(19) United States
(12) Patent Application Publication
(10) Pub. No.: US 2006/0014166 A1
(43) Pub. Date: Jan. 19, 2006

(54) Novel nucleotide and amino acid sequences, and assays and methods of use thereof for diagnosis of endometriosis

(76) Inventors: Yossi Cohen, Banstead (GB); Sarah Pollock, Tel-Aviv (IL); Amit Novik, Beit-HaSharon (IL); Alexander Diber, Rishon-LeZion (IL)

Correspondence Address: STAAS & HALSEY LLP, SUITE 700, 1201 NEW YORK AVENUE, N.W., WASHINGTON, DC, 20005, US

(21) Appl. No.: 11/043,788

(22) Filed: Jan. 27, 2005

Related U.S. Application Data
(60) Provisional application No. 60/628,145, filed on Nov. 17, 2004.
(60) Provisional application No. 60/628,178, filed on Nov. 17, 2004.
(60) Provisional application No. 60/621,004, filed on Oct. 22, 2004.
(60) Provisional application No. 60/628,230, filed on Nov. 17, 2004.
(60) Provisional application No. 60/539,129, filed on Jan. 27, 2004.
(60) Provisional application No. 60/539,128, filed on Jan. 27, 2004.

(51) Int. Cl. C12Q 1/68; C07H 21/04; C12N 15/09; C07K 14/47; C07K 16/18

(52) U.S. Cl. 435/6; 435/69.1; 435/320.1; 435/325; 530/324; 530/388.25; 536/23.5

(57) ABSTRACT

Novel markers for endometriosis that are both sensitive and accurate. These markers are differentially expressed in endometriosis specifically, as opposed to normal tissue. The measurement of these markers, alone or in combination, in patient samples provides information that the diagnostician can correlate with a probable diagnosis of endometriosis. The markers of the present invention, alone or in combination, show a high degree of differential detection between endometriosis and non-endometriosis states.

### CROSS-REFERENCE TO RELATED APPLICATION(S)

[0001] THIS APPLICATION IS RELATED TO NOVEL NUCLEOTIDE AND AMINO ACID SEQUENCES, AND ASSAYS AND METHODS OF USE THEREOF FOR DIAGNOSIS OF ENDOMETRIOSIS, AND CLAIMS PRIORITY TO THE BELOW U.S. PROVISIONAL APPLICATIONS WHICH ARE INCORPORATED BY REFERENCE HEREIN:
[0002] APPLICATION No. 60/628,145 FILED Nov. 17, 2004—DIFFERENTIAL EXPRESSION OF MARKERS IN PANCREATIC CANCER II
[0003] APPLICATION No. 60/628,178 FILED Nov. 17, 2004—DIFFERENTIAL EXPRESSION OF MARKERS IN BRAIN CANCER II
[0004] APPLICATION No. 60/621,004 FILED Oct. 22, 2004—DIFFERENTIAL EXPRESSION OF MARKERS IN SKIN AND EPITHELIAL CANCER II
[0005] APPLICATION No. 60/628,230 FILED Nov. 17, 2004—DIFFERENTIAL EXPRESSION OF MARKERS IN ENDOMETRIOSIS
[0006] APPLICATION No. 60/539,129 FILED Jan. 27, 2004—METHODS AND SYSTEMS FOR ANNOTATING BIOMOLECULAR SEQUENCES
[0007] APPLICATION No. 60/539,128 FILED Jan. 27, 2004—EVOLUTIONARY CONSERVED SPLICED SEQUENCES AND METHODS AND SYSTEMS FOR IDENTIFYING THEREOF

### FIELD OF THE INVENTION

[0008] The present invention is related to novel nucleotide and protein sequences that are diagnostic markers for endometriosis, and assays and methods of use thereof.

### BACKGROUND OF THE INVENTION

[0009] Endometriosis represents one of the most common admitting diagnoses in women of reproductive age. It is defined as the presence of endometrial tissue outside of the uterus and is typically present in the pelvis such as on the ovaries and pelvic peritoneum. It may also involve the bowel, ureter or bladder. Endometriosis is a common gynecologic disorder that presents with chronic pelvic pain or infertility. The histologic diagnosis requires the presence of endometrial glands and stroma from a tissue sample. (Clin Chim Acta. 2004 February; 340(1-2):41-56). Endometriosis diagnosis is problematic. Studies in the USA, UK and Australia have demonstrated that the delay in the diagnosis of endometriosis is universal. For example, a study by the Australian Endometriosis Society in 1990 found a delay of approximately 4.4 years from consultation to diagnosis. Younger women are more likely to experience a delay in diagnosis. Those between 15-19 years of age experience an average delay to diagnosis of 8.3 years (Aust Fam Physician. 2001 July; 30(7):649-53).

[0010] The gold standard for the diagnosis of endometriosis is a surgical intervention, a laparoscopy. The severity of disease is variable and patients are usually categorized according to the American Fertility Society classification of disease into four groups that represent mild to severe disease, stages I to IV. There is a poor correlation between the severity of disease and the patient's symptoms. Furthermore, the disease can be found in asymptomatic patients. This heterogeneity in clinical presentation has contributed to the difficulties in identifying a marker. Since some women are asymptomatic, clinical trials require a control group of women that require a surgical procedure to exclude the presence of endometriosis. Considerable effort has been invested in searching for non-invasive methods of diagnosis (Clin Chim Acta. 2004 February; 340(1-2):41-56).

[0011] Serum CA-125, a 200,000 Da glycoprotein, concentration has been associated with the presence of many gynecologic disorders including endometriosis (Int J Biol Markers. 1998 October-December; 13(4):231-7). The CA-125 antigen is expressed in many normal tissues such as the endometrium, endocervix and peritoneum. In some women, CA-125 levels increase during menstruation. Mean CA-125 levels are higher during menses in patients with and without endometriosis and it is therefore recommended that CA-125 levels not be drawn during a menstrual period (Am J Obstet Gynecol. 1987 December; 157(6):1426-8). Many studies tried to assess the role of serum CA-125 measurement in the detection of endometriosis. The main confounding variable in determining the sensitivity and specificity of serum CA-125 is the stage of the disease. Typically, most patients with advanced endometriosis (and few patients with early stage disease) will have elevated serum CA-125 levels (similar to what occurs in ovarian cancer). A recent meta-analysis performed to assess the diagnostic performance of serum CA-125 in detecting endometriosis (Fertil Steril. 1998 December; 70(6):1101-8) Showed sensitivity ranged from 4% to 100% and the specificity ranged from 38% to 100% for the diagnosis of any stage of disease. The ROC curve showed a poor diagnostic performance. At a specificity of 90%, a sensitivity of 28% was reported. If the sensitivity was increased to 50%, the specificity dropped to 72%. For advanced disease, the sensitivity ranged from 0% to 100% and the specificity ranged from 44% to 95%. For a specificity of approximately 90%, the sensitivity was 47%. If the sensitivity was increased to 60%, the specificity dropped to 81% (Fertil Steril. 1998 December; 70(6):1101-8). According to the authors of this study, a negative result would delay the diagnosis in 70% of patients with endometriosis. The routine use of serum CA-125 cannot be advocated as a diagnostic tool to exclude the diagnosis of endometriosis in patients with chronic pelvic pain or infertility. CA-125 may be more useful in evaluating recurrent disease or the success of a surgical treatment. Many investigators have measured levels of CA-125 in the peritoneal fluid of patients with and without endometriosis (Gynecol Obstet Invest. 1990; 30(2):105-8). Although peritoneal fluid levels of CA-125 are almost 10 times higher than serum levels, no differences were found between women with and without Endometriosis (Fertil Steril. 1991 November; 56(5):863-9). CA-125 levels have also been measured in other body fluids such as menstrual discharge and uterine fluid but were not found to be useful in clinical practice.

[0012] CA 19-9 is a high-molecular-weight glycoprotein elevated in patients with malignant and benign ovarian tumors including ovarian chocolate cysts. Serum CA19-9 levels in women with endometriosis fell significantly after treatment for endometriosis when compared with the basal levels before treatment (Eur J Gynaecol Oncol. 1998; 19(5):498-500). There are a limited number of reports on the significance of serum CA19-9 levels in the diagnosis of endometriosis but the overall conclusion is that the clinical utility of the CA19-9 measurement is not superior to that of the CA-125. For example, in one study (Fertil Steril. 2002 October; 78(4):733-9) when comparing the sensitivities of the CA19-9 and CA-125 tests for the diagnosis of endometriosis, the authors found that the sensitivity of the CA19-9 test was significantly lower than that of the CA-125 test (34% and 49%, respectively).

[0013] Soluble forms of the intercellular-adhesion molecule-1 (sICAM-1) are secreted from the endometrium and endometriotic implants. Moreover, endometrium from women with endometriosis secretes a higher amount of this molecule than tissue from women without the disease. Consequently, a strong correlation exists between levels of sICAM-1 shed by the endometrium and the number of endometriotic implants in the pelvis (Obstet Gynecol. 2000 January; 95(1):115-8). It has been hypothesized that sICAM-1 may be useful in the diagnosis of endometriosis. A few studies reported a significant increase in serum concentration of sICAM-1 in patients with endometriosis (for example, Am J Reprod Immunol. 2000 March; 43(3):160-6) but overall it was shown that serum levels of sICAM-1 were only slightly but not significantly higher in women with endometriosis than in women without the disease unless the disease is of high stage (deep peritoneal) (Fertil Steril. 2002 May; 77(5):1028-31). The sensitivity and specificity of sICAM-1 in detecting deep peritoneal endometriosis were 19% and 97%, respectively. It has been shown that in women with deep infiltrating Endometriosis measurement of CA-125 and sICAM-1 together may improve diagnosis.

[0014] Serum placental protein 14 (PP-14)—currently known as glycodelin-A was found to be significantly higher in endometriosis patients than in healthy controls (Am J Obstet Gynecol. 1989 October; 161(4):866-71). Levels were significantly lowered by conservative surgery as well as by treatment with danazol and medroxy progesterone acetate. The ability of serum PP-14 levels to diagnose of endometriosis is limited because of a low sensitivity (59%). Typically, the peritoneal fluid concentrations of PP-14 are low. The levels are elevated in the luteal phase of endometriosis patients. It is controversial whether this is of any diagnostic importance or not.

[0015] Tumor necrosis factors (TNF) play an essential role in the inflammatory process. TNF is believed to involve in many physiological and pathological reproductive processes. The main TNF is TNF-a. In the human endometrium, TNF-a is a factor in the normal physiology of endometrial proliferation and shedding. TNF-a is expressed mostly in epithelial cells, particularly in the secretory phase. Stromal cells stain for TNF-a mostly in the proliferative phase of the menstrual cycle. Therefore it is believed it is probably influenced by hormones. TNF-a concentrations in peritoneal fluid are elevated in patients with endometriosis, but it is controversial whether they are correlated with disease stage or not (ertil Steril. 1988 October; 50(4):573-9). It has been suggested that measurement of TNF-a peritoneal fluid can be used as a foundation for non-surgical diagnosis of endometriosis but that hasn't been comprehensively checked (Hum Reprod. 2002 February; 17(2):426-31).

[0016] IL-6 is a regulator of inflammation and immunity and modulates secretion of other cytokines, promotes T-cell activation and B-cell differentiation and inhibits growth of various human cell lines. IL-6 is produced by different cells including endometrial epithelial stromal cells. The role of IL-6 in the pathogenesis of endometriosis has been extensively studied. IL-6 response is different in peritoneal macrophages, endometrial stromal cells and peripheral macrophages in patients with endometriosis (Fertil Steril. 1996 June; 65(6):1125-9). It has been shown that IL-6 was significantly elevated in the sera of endometriosis patients but not in their peritoneal fluid as compared with patients with unexplained infertility and tubal ligation/reanastomosis (Hum Reprod. 2002 February; 17(2):426-31). That finding was contradicted by other works but it is thought the different results might be attributed to the antibody specificity of the assay.

[0017] There has been some work on the proliferation and neovascularization of the endometriotic implants, and particularly on the role of Vascular endothelial growth factor (VEGF). The basic physiological function of VEGF is to induce angiogenesis, which allows the endometrium to repair itself following menstruation. It also modulates the characteristics of the newly formed vessels by controlling the microvascular permeability and permitting the formation of a fibrin matrix for endothelial cell migration and proliferation (Science 1985; 227:1059-61). This modulation may be responsible for local endometrial edema, which helps prepare the endometrium for embryo implantation. In endometriosis patients, VEGF is localized in the epithelium of endometriotic implants (J Clin Endocrinol Metab 1996; 81:3112-8), particularly in hemorrhagic red implants (Hum Reprod 1998; 13:1686-90). Moreover, the concentration of VEGF is increased in the peritoneal fluid of endometriosis patients. The exact cellular sources of VEGF in peritoneal fluid have not yet been precisely defined. Although evidence suggests that endometriotic lesions themselves produce this factor, activated peritoneal macrophages also can synthesize and secrete VEGF (Hum Reprod 1996; 11:220-3). Antiangiogenic drugs are potential therapeutic agents in endometriosis.

[0018] There are many more cytokines which were considered for the purpose of Endometriosis diagnosis, among them RANTES (Regulated on Activation, Normal T-Cell Expressed and Secreted) where in vitro secretion of RANTES by endometrioma-derived stromal cell cultures is significantly greater than in eutopic endometrium (Am J Obstet Gynecol 1993; 169:1545-9), IL-1 where research has shown that the administration of exogenous IL-1 receptor antagonist blocks successful implantation in mice (Endocrinology 1994; 134:521-8), IL-4, IL-5, IL-8, IL-10, IL-12, IL-13, interferon-gamma; MCP-1, MCSF and TGF. Most often, they have not been extensively investigated as a diagnostic tool. One group studies a panel of serum and peritoneal fluid such markers for the prediction of endometriosis (Hum Reprod. 2002 February; 17(2):426-31). Serum and peritoneal fluid from 130 women were obtained while they underwent laparoscopy for pain, infertility, tubal ligation or sterilization reversal. They measured the concentrations of 6 cytokines (IL-1, IL-6, IL-8, IL-12, IL-13 and TNF-a) in serum and peritoneal fluid and levels of reactive oxygen species (ROS) in peritoneal fluid. Only serum IL-6 and peritoneal fluid TNF-a could discriminate between patients with and without endometriosis with a high degree of sensitivity and specificity. The peritoneal fluid TNF-a had a very good 99% area under the curve but in that study all peritoneal fluid samples that were contaminated by blood (a common procedure artifact) were excluded from study. Therefore this result has only a partial practical value.

[0019] A few Endometrial tissue biochemical markers were investigated in the context of endometriosis. Aromatase P450 is a catalyst of the conversion of androstenedione and testosterone to estrone and estradiol, respectively. It is expressed in both eutopic and ectopic endometrium of endometriosis patients but not in eutopic endometrium of healthy controls (Biol Reprod 1997; 57:514-9). Although endometrial aromatase P450 expression does not correlate with the disease stage, a recent study demonstrated that detection of aromatase P450 transcripts in the endometrium of endometriosis patients may be a potential qualitative marker of endometriosis Fertil Steril 2002; 78:825-9). The potential use of such marker as a clinically useful diagnostic tool of pelvic disease is limited by the observation that large numbers of women with endometriosis do not express aromatase P450 in their eutopic endometrium. Cytokeratins 8, 18, 19, vimentin and human leukocyte class I antigens were shown to be immunoreactive in endometriosis cell lines (Hum Reprod Update 1997; 3:117-23). More genes have shown to be aberrantly regulated in the endometrium of women with endometriosis including avBeta3 integrin, beta1-integrin, E-cadherin, 17b-hydroxysteroid dehydrogenase type-1, Monocyte chemotactic protein-1, interleukin-1 receptor type II, cyclooxygenase-2, Endoglin, C3 complement, Heat shock protein 27, Xanthine oxidase, Superoxidase dismutase, Endometrial bleeding-assoicated factor and HOX gene. No studies have evaluated the use of these molecular markers as a potential diagnostic/screening tool in endometriosis. The reasons for that are that the level of expression may vary considerably among individuals and biopsy samples, the abnormal expression pattern may be confined to a certain phase in the cycle and that immunostaining is subjective and observer dependant method (Obstet Gynecol Clin North Am. 2003 March; 30(1):95-114, viii-ix).

### SUMMARY OF THE INVENTION

[0020] The background art does not teach or suggest markers for endometriosis that are sufficiently sensitive and/or accurate, alone or in combination.

[0021] The present invention overcomes these deficiencies of the background art by providing novel markers for endometriosis that are both sensitive and accurate. These markers are overexpressed in endometriosis specifically, as opposed to normal tissues. The measurement of these markers, alone or in combination, in patient (biological) Samples provides information that the diagnostician can correlate with a probable diagnosis of endometriosis. The markers of the present invention, alone or in combination, show a high degree of differential detection between normal and endometriosis states.

[0022] According to preferred embodiments of the present invention, examples of suitable biological samples which may optionally be used with preferred embodiments of the present invention include but are not limited to blood, serum, plasma, blood cells, urine, sputum, saliva, stool, spinal fluid or CSF, lymph fluid, the external secretions of the skin, respiratory, intestinal, and genitourinary tracts, tears, milk, neuronal tissue, breast tissue, any human organ or tissue, including any tumor or normal tissue, any sample obtained by lavage (for example of the bronchial system or of the uterus), and also samples of in vivo cell culture constituents. In a preferred embodiment, the biological sample comprises uterine tissue, preferably endometrial tissue found anywhere in the pelvic or abdominal cavity and/or a serum sample and/or a urine sample and/or any other tissue or liquid sample. The sample can optionally be diluted with a suitable eluant before contacting the sample to an antibody and/or performing any other diagnostic assay.

[0023] Information given in the text with regard to cellular localization was determined according to four different software programs: (i) tmhmm (from Center for Biological Sequence Analysis, Technical University of Denmark DTU, http://www.cbs.dtu.dk/services/TMHMM/TMHMM2.0b.guide.php) or (ii) tmpred (from EMBnet, maintained by the ISREC Bionformatics group and the LICR Information Technology Office, Ludwig Institute for Cancer Research, Swiss Institute of Bioinformatics, http://www.ch.embnet.org/software/TMPRED_form.html) for transmembrane region prediction; (iii) Signalp_hmm or (iv) Signalp_nn (both from Center for Biological Sequence Analysis, Technical University of Denmark DTU, http://www.cbs.dtu.dk/services/SignalP/background/prediction.php) for signal peptide prediction. The terms “signalphmm” and “signalp_nn” refer to two modes of operation for the program SignalP: hmm refers to Hidden Markov Model, while nn refers to neural networks. Localization was also determined through manual inspection of known protein localization and/or gene structure, and the use of heuristics by the individual inventor. In some cases for the manual inspection of cellular localization prediction inventors used the ProLoc computational platform [Einat Hazkani-Covo, Erez Levanon, Galit Rotman, Dan Graur and Amrit Novik; (2004) “Evolution of multicellularity in metazoa: comparative analysis of the subcellular localization of proteins in Saccharomyces, Drosophila and Caenorhabditis.” Cell Biology International 2004; 28(3):171-8.], which predicts protein localization based on various parameters including, protein domains (e.g., prediction of trans-membranous regions and localization thereof within the protein), pI, protein length, amino acid composition, homology to pre-annotated proteins, recognition of sequence patterns which direct the protein to a certain organelle (such as, nuclear localization signal, NLS, mitochondria localization signal), signal peptide and anchor modeling and using unique domains from Pfam that are specific to a single compartment.

[0024] Information is given in the text with regard to SNPs (single nucleotide polymorphisms). A description of the abbreviations is as follows. “T->C”, for example, means that the SNP results in a change at the position given in the table from T to C. Similarly, “M->Q”, for example, means that the SNP has caused a change in the corresponding amino acid sequence, from methionine (M) to glutamine (Q). If, in place of a letter at the right hand side for the nucleotide sequence SNP, there is a space, it indicates that a frameshift has occurred. A frameshift may also be indicated with a hyphen (−). A stop codon is indicated with an asterisk at the right hand side (*). As part of the description of an SNP, a comment may be found in parentheses after the above description of the SNP itself. This comment may include an FTId, which is an identifier to a SwissProt entry that was created with the indicated SNP. An FTId is a unique and stable feature identifier, which allows construction of links directly from position-specific annotation in the feature table to specialized protein-related databases. The FTId is always the last component of a feature in the description field, as follows: FTId=XXX_number, in which XXX is the 3-letter code for the specific feature key, separated by an underscore from a 6-digit number. In the table of the amino acid mutations of the wild type proteins of the selected splice variants of the invention, the header of the first column is “SNP position(s) on amino acid sequence”, representing a position of a known mutation on amino acid sequence. SNPs may optionally be used as diagnostic markers according to the present invention, alone or in combination with one or more other SNPs and/or any other diagnostic marker. Preferred embodiments of the present invention comprise such SNPs, including but not limited to novel SNPs on the known (WT or wild type) protein sequences given below, as well as novel nucleic acid and/or amino acid sequences formed through such SNPs, and/or any SNP on a variant amino acid and/or nucleic acid sequence described herein.

[0025] Information given in the text with regard to the Homology to the known proteins was determined by Smith-Waterman version 5.1.2 using special (non default) parameters as follows:
[0026] model=sw.model
[0027] GAPEXT=0
[0028] GAPOP=100.
[0029] MATRIX=blosum 100

[0030] It should be noted that the terms “segment”, “seg” and “node” are used interchangeably in reference to nucleic acid sequences of the present invention; they refer to portions of nucleic acid sequences that were shown to have one or more properties as described below. They are also the building blocks that were used to construct complete nucleic acid sequences as described in greater detail below. Optionally and preferably, they are examples of oligonucleotides which are embodiments of the present invention, for example as amplicons, hybridization units and/or from which primers and/or complementary oligonucleotides may optionally be derived, and/or for any other use.

[0031] As used herein the phrase “endometriosis” refers to any type of endometriosis and/or disease of the endometrium and/or of endometrial tissue.

[0032] The term “marker” in the context of the present invention refers to a nucleic acid fragment, a peptide, or a polypeptide, which is differentially present in a sample taken from subjects (patients) Having endometriosis as compared to a comparable sample taken from subjects who do not have endometriosis.

[0033] The phrase “differentially present” refers to differences in the quantity of a marker present in a sample taken from patients having endometriosis as compared to a comparable sample taken from patients who do not have endometriosis. For example, a nucleic acid fragment may optionally be differentially present between the two samples if the amount of the nucleic acid fragment in one sample is significantly different from the amount of the nucleic acid fragment in the other sample, for example as measured by hybridization and/or NAT-based assays. A polypeptide is differentially present between the two samples if the amount of the polypeptide in one sample is significantly different from the amount of the polypeptide in the other sample. It should be noted that if the marker is detectable in one sample and not detectable in the other, then such a marker can be considered to be differentially present.

[0034] As used herein the phrase “diagnostic” means identifying the presence or nature of a pathologic condition. Diagnostic methods differ in their sensitivity and specificity. The “sensitivity” of a diagnostic assay is the percentage of diseased individuals who test positive (percent of “true positives”). Diseased individuals not detected by the assay are “false negatives.” Subjects who are not diseased and who test negative in the assay are termed “true negatives.” The “specificity” of a diagnostic assay is 1 minus the false positive rate, where the “false positive” rate is defined as the proportion of those without the disease who test positive. While a particular diagnostic method may not provide a definitive diagnosis of a condition, it suffices if the method provides a positive indication that aids in diagnosis.

[0035] As used herein the phrase “diagnosing” refers to classifying a disease or a symptom, determining a severity of the disease, monitoring disease progression, forecasting an outcome of a disease and/or prospects of recovery. The term “detecting” may also optionally encompass any of the above.

[0036] Diagnosis of a disease according to the present invention can be effected by determining a level of a polynucleotide or a polypeptide of the present invention in a biological sample obtained from the subject, wherein the level determined can be correlated with predisposition to, or presence or absence of the disease. It should be noted that a “biological sample obtained from the subject” may also optionally comprise a sample that has not been physically removed from the subject, as described in greater detail below.

[0037] As used herein, the term “level” refers to expression levels of RNA and/or protein or to DNA copy number of a marker of the present invention.

[0038] Typically the level of the marker in a biological sample obtained from the subject is different (i.e., increased or decreased) from the level of the same variant in a similar sample obtained from a healthy individual (examples of biological samples are described herein).

[0039] Numerous well known tissue or fluid collection methods can be utilized to collect the biological sample from the subject in order to determine the level of DNA, RNA and/or polypeptide of the variant of interest in the subject.

[0040] Examples include, but are not limited to, fine needle biopsy, needle biopsy, core needle biopsy and surgical biopsy (e.g., brain biopsy), and lavage. Regardless of the procedure employed, once a biopsy/sample is obtained the level of the variant can be determined and a diagnosis can thus be made.

[0041] Determining the level of the same variant in normal tissues of the same origin is preferably effected along-side to detect an elevated expression and/or amplification and/or a decreased expression, of the variant as opposed to the normal tissues.

[0042] A “test amount” of a marker refers to an amount of a marker in a subject's sample that is consistent with a diagnosis of endometriosis. A test amount can be either in absolute amount (e.g., microgram/ml) or a relative amount (e.g., relative intensity of signals).

[0043] A “control amount” of a marker can be any amount or a range of amounts to be compared against a test amount of a marker. For example, a control amount of a marker can be the amount of a marker in a patient with endometriosis or a person without endometriosis. A control amount can be either in absolute amount (e.g., microgram/ml) or a relative amount (e.g., relative intensity of signals).

[0044] “Detect” refers to identifying the presence, absence or amount of the object to be detected.

[0045] A “label” includes any moiety or item detectable by spectroscopic, photo chemical, biochemical, immunochemical, or chemical means. For example, useful labels include ³²P, ³⁵S, fluorescent dyes, electron-dense reagents, enzymes (e.g., as commonly used in an ELISA), biotin-streptavadin, dioxigenin, haptens and proteins for which antisera or monoclonal antibodies are available, or nucleic acid molecules with a sequence complementary to a target. The label often generates a measurable signal, such as a radioactive, chromogenic, or fluorescent signal, that can be used to quantify the amount of bound label in a sample. The label can be incorporated in or attached to a primer or probe either covalently, or through ionic, van der Waals or hydrogen bonds, e.g., incorporation of radioactive nucleotides, or biotinylated nucleotides that are recognized by streptavadin. The label may be directly or indirectly detectable. Indirect detection can involve the binding of a second label to the first label, directly or indirectly. For example, the label can be the ligand of a binding partner, such as biotin, which is a binding partner for streptavadin, or a nucleotide sequence, which is the binding partner for a complementary sequence, to which it can specifically hybridize. The binding partner may itself be directly detectable, for example, an antibody may be itself labeled with a fluorescent molecule. The binding partner also may be indirectly detectable, for example, a nucleic acid having a complementary nucleotide sequence can be a part of a branched DNA molecule that is in turn detectable through hybridization with other labeled nucleic acid molecules (see, e.g., P. D. Fahrlander and A. Klausner, Bio/Technology 6:1165 (1988)). Quantitation of the signal is achieved by, e.g., scintillation counting, densitometry, or flow cytometry.

[0046] Exemplary detectable labels, optionally and preferably for use with immunoassays, include but are not limited to magnetic beads, fluorescent dyes, radiolabels, enzymes (e.g., horse radish peroxide, alkaline phosphatase and others commonly used in an ELISA), and calorimetric labels such as colloidal gold or colored glass or plastic beads. Alternatively, the marker in the sample can be detected using an indirect assay, wherein, for example, a second, labeled antibody is used to detect bound marker-specific antibody, and/or in a competition or inhibition assay wherein, for example, a monoclonal antibody which binds to a distinct epitope of the marker are incubated simultaneously with the mixture.

[0047] “Immunoassay” is an assay that uses an antibody to specifically bind an antigen. The immunoassay is characterized by the use of specific binding properties of a particular antibody to isolate, target, and/or quantify the antigen.

[0048] The phrase “specifically (or selectively) binds” to an antibody or “specifically (or selectively) immunoreactive with,” when referring to a protein or peptide (or other epitope), refers to a binding reaction that is determinative of the presence of the protein in a heterogeneous population of proteins and other biologics. Thus, under designated immunoassay conditions, the specified antibodies bind to a particular protein at least two times greater than the background (non-specific signal) and do not substantially bind in a significant amount to other proteins present in the sample. Specific binding to an antibody under such conditions may require an antibody that is selected for its specificity for a particular protein. For example, polyclonal antibodies raised to seminal basic protein from specific species such as rat, mouse, or human can be selected to obtain only those polyclonal antibodies that are specifically immunoreactive with seminal basic protein and not with other proteins, except for polymorphic variants and alleles of seminal basic protein. This selection may be achieved by subtracting out antibodies that cross-react with seminal basic protein molecules from other species. A variety of immunoassay formats may be used to select antibodies specifically immunoreactive with a particular protein. For example, solid-phase ELISA immunoassays are routinely used to select antibodies specifically immunoreactive with a protein (see, e.g., Harlow & Lane, Antibodies, A Laboratory Manual (1988), for a description of immunoassay formats and conditions that can be used to determine specific immunoreactivity). Typically a specific or selective reaction will be at least twice background signal or noise and more typically more than 10 to 100 times background.

[0049] According to preferred embodiments of the present invention, there is provided a nucleic acid sequence comprising a sequence from the table below; and/or

Transcript Name

S71513_T2 (SEQ ID NO: 1)

[0050] a nucleic acid sequence comprising a sequence from the table below:

Segment Name

S71513_node_0 (SEQ ID NO: 2)
S71513_node_5 (SEQ ID NO: 3)
S71513_node_6 (SEQ ID NO: 4)
S71513_node_8 (SEQ ID NO: 5)
S71513_node_1 (SEQ ID NO: 6)
S71513_node_4 (SEQ ID NO: 7)

[0051] According to preferred embodiments of the present invention, there is provided an amino acid sequence comprising a sequence from the table below:

Protein Name

S71513_P2 (SEQ ID NO: 9)

[0052] According to preferred embodiments of the present invention, there is provided a nucleic acid sequence comprising a sequence from the table below; and/or

Transcript Name

HUMELAM1A_T1 (SEQ ID NO: 10)
HUMELAM1A_T5 (SEQ ID NO: 11)
HUMELAM1A_T6 (SEQ ID NO: 12)

[0053] a nucleic acid sequence comprising a sequence from the table below:

Segment Name

HUMELAM1A_node_5 (SEQ ID NO: 13)
HUMELAM1A_node_8 (SEQ ID NO: 14)
HUMELAM1A_node_10 (SEQ ID NO: 15)
HUMELAM1A_node_11 (SEQ ID NO: 16)
HUMELAM1A_node_13 (SEQ ID NO: 17)
HUMELAM1A_node_15 (SEQ ID NO: 18)
HUMELAM1A_node_18 (SEQ ID NO: 19)
HUMELAM1A_node_19 (SEQ ID NO: 20)
HUMELAM1A_node_20 (SEQ ID NO: 21)
HUMELAM1A_node_22 (SEQ ID NO: 22)
HUMELAM1A_node_33 (SEQ ID NO: 23)
HUMELAM1A_node_0 (SEQ ID NO: 24)
HUMELAM1A_node_2 (SEQ ID NO: 25)
HUMELAM1A_node_7 (SEQ ID NO: 26)
HUMELAM1A_node_24 (SEQ ID NO: 27)
HUMELAM1A_node_26 (SEQ ID NO: 28)
HUMELAM1A_node_29 (SEQ ID NO: 29)

[0054] According to preferred embodiments of the present invention, there is provided an amino acid sequence comprising a sequence from the table below:

Protein Name

HUMELAM1A_P2 (SEQ ID NO: 31)
HUMELAM1A_P2 (SEQ ID NO: 32)
HUMELAM1A_P2 (SEQ ID NO: 33)

[0055] According to preferred embodiments of the present invention, there is provided a nucleic acid sequence comprising a sequence from the table below; and/or

Transcript Name

HUMHPA1B_PEA_1_T1 (SEQ ID NO: 34)
HUMHPA1B_PEA_1_T4 (SEQ ID NO: 35)
HUMHPA1B_PEA_1_T6 (SEQ ID NO: 36)
HUMHPA1B_PEA_1_T7 (SEQ ID NO: 37)
HUMHPA1B_PEA_1_T12 (SEQ ID NO: 38)
HUMHPA1B_PEA_1_T16 (SEQ ID NO: 39)
HUMHPA1B_PEA_1_T19 (SEQ ID NO: 40)
HUMHPA1B_PEA_1_T20 (SEQ ID NO: 41)
HUMHPA1B_PEA_1_T27 (SEQ ID NO: 42)
HUMHPA1B_PEA_1_T29 (SEQ ID NO: 43)
HUMHPA1B_PEA_1_T55 (SEQ ID NO: 44)
HUMHPA1B_PEA_1_T56 (SEQ ID NO: 45)
HUMHPA1B_PEA_1_T59 (SEQ ID NO: 46)

[0056] and/or a nucleic acid sequence comprising a sequence from the table below:

Segment Name

HUMHPA1B_PEA_1_node_20 (SEQ ID
NO: 47)
HUMHPA1B_PEA_1_node_25 (SEQ ID
NO: 48)
HUMHPA1B_PEA_1_node_28 (SEQ ID
NO: 49)
HUMHPA1B_PEA_1_node_35 (SEQ ID
NO: 50)
HUMHPA1B_PEA_1_node_88 (SEQ ID
NO: 51)
HUMHPA1B_PEA_1_node_0 (SEQ ID
NO: 52)
HUMHPA1B_PEA_1_node_1 (SEQ ID
NO: 53)
HUMHPA1B_PEA_1_node_3 (SEQ ID
NO: 54)
HUMHPA1B_PEA_1_node_4 (SEQ ID
NO: 55)
HUMHPA1B_PEA_1_node_5 (SEQ ID
NO: 56)
HUMHPA1B_PEA_1_node_6 (SEQ ID
NO: 57)
HUMHPA1B_PEA_1_node_7 (SEQ ID
NO: 58)
HUMHPA1B_PEA_1_node_10 (SEQ ID
NO: 59)
HUMHPA1B_PEA_1_node_11 (SEQ ID
NO: 60)
HUMHPA1B_PEA_1_node_12 (SEQ ID
NO: 61)
HUMHPA1B_PEA_1_node_13 (SEQ ID
NO: 62)
HUMHPA1B_PEA_1_node_14 (SEQ ID
NO: 63)
HUMHPA1B_PEA_1_node_15 (SEQ ID
NO: 64)
HUMHPA1B_PEA_1_node_16 (SEQ ID
NO: 65)
HUMHPA1B_PEA_1_node_17 (SEQ ID
NO: 66)
HUMHPA1B_PEA_1_node_18 (SEQ ID
NO: 67)
HUMHPA1B_PEA_1_node_19 (SEQ ID
NO: 68)
HUMHPA1B_PEA_1_node_21 (SEQ ID
NO: 69)
HUMHPA1B_PEA_1_node_22 (SEQ ID
NO: 70)
HUMHPA1B_PEA_1_node_23 (SEQ ID
NO: 71)
HUMHPA1B_PEA_1_node_24 (SEQ ID
NO: 72)
HUMHPA1B_PEA_1_node_27 (SEQ ID
NO: 73)
HUMHPA1B_PEA_1_node_29 (SEQ ID
NO: 74)
HUMHPA1B_PEA_1_node_30 (SEQ ID
NO: 75)
HUMHPA1B_PEA_1_node_31 (SEQ ID
NO: 76)
HUMHPA1B_PEA_1_node_32 (SEQ ID
NO: 77)
HUMHPA1B_PEA_1_node_33 (SEQ ID
NO: 78)
HUMHPA1B_PEA_1_node_34 (SEQ ID
NO: 79)
HUMHPA1B_PEA_1_node_36 (SEQ ID
NO: 80)
HUMHPA1B_PEA_1_node_37 (SEQ ID
NO: 81)
HUMHPA1B_PEA_1_node_38 (SEQ ID
NO: 82)
HUMHPA1B_PEA_1_node_39 (SEQ ID
NO: 83)
HUMHPA1B_PEA_1_node_40 (SEQ ID
NO: 84)
HUMHPA1B_PEA_1_node_41 (SEQ ID
NO: 85)
HUMHPA1B_PEA_1_node_42 (SEQ ID
NO: 86)
HUMHPA1B_PEA_1_node_43 (SEQ ID
NO: 87)
HUMHPA1B_PEA_1_node_44 (SEQ ID
NO: 88)
HUMHPA1B_PEA_1_node_45 (SEQ ID
NO: 89)
HUMHPA1B_PEA_1_node_46 (SEQ ID
NO: 90)
HUMHPA1B_PEA_1_node_47 (SEQ ID
NO: 91)
HUMHPA1B_PEA_1_node_48 (SEQ ID
NO: 92)
HUMHPA1B_PEA_1_node_49 (SEQ ID
NO: 93)
HUMHPA1B_PEA_1_node_50 (SEQ ID
NO: 94)
HUMHPA1B_PEA_1_node_51 (SEQ ID
NO: 95)
HUMHPA1B_PEA_1_node_52 (SEQ ID
NO: 96)
HUMHPA1B_PEA_1_node_53 (SEQ ID
NO: 97)
HUMHPA1B_PEA_1_node_54 (SEQ ID
NO: 98)
HUMHPA1B_PEA_1_node_55 (SEQ ID
NO: 99)
HUMHPA1B_PEA_1_node_56 (SEQ ID
NO: 100)
HUMHPA1B_PEA_1_node_57 (SEQ ID
NO: 101)
HUMHPA1B_PEA_1_node_58 (SEQ ID
NO: 102)
HUMHPA1B_PEA_1_node_59 (SEQ ID
NO: 103)
HUMHPA1B_PEA_1_node_60 (SEQ ID
NO: 104)
HUMHPA1B_PEA_1_node_61 (SEQ ID
NO: 105)
HUMHPA1B_PEA_1_node_62 (SEQ ID
NO: 106)
HUMHPA1B_PEA_1_node_63 (SEQ ID
NO: 107)
HUMHPA1B_PEA_1_node_64 (SEQ ID
NO: 108)
HUMHPA1B_PEA_1_node_65 (SEQ ID
NO: 109)
HUMHPA1B_PEA_1_node_66 (SEQ ID
NO: 110)
HUMHPA1B_PEA_1_node_67 (SEQ ID
NO: 111)
HUMHPA1B_PEA_1_node_69 (SEQ ID
NO: 112)
HUMHPA1B_PEA_1_node_70 (SEQ ID
NO: 113)
HUMHPA1B_PEA_1_node_71 (SEQ ID
NO: 114)
HUMHPA1B_PEA_1_node_72 (SEQ ID
NO: 115)
HUMHPA1B_PEA_1_node_73 (SEQ ID
NO: 116)
HUMHPA1B_PEA_1_node_74 (SEQ ID
NO: 117)
HUMHPA1B_PEA_1_node_75 (SEQ ID
NO: 118)
HUMHPA1B_PEA_1_node_76 (SEQ ID
NO: 119)
HUMHPA1B_PEA_1_node_77 (SEQ ID
NO: 120)
HUMHPA1B_PEA_1_node_78 (SEQ ID
NO: 121)
HUMHPA1B_PEA_1_node_79 (SEQ ID
NO: 122)
UMHPA1B_PEA_1_node_80 (SEQ ID
NO: 123)
HUMHPA1B_PEA_1_node_81 (SEQ ID
NO: 124)
HUMHPA1B_PEA_1_node_82 (SEQ ID
NO: 125)
HUMHPA1B_PEA_1_node_83 (SEQ ID
NO: 126)
HUMHPA1B_PEA_1_node_84 (SEQ ID
NO: 127)
HUMHPA1B_PEA_1_node_85 (SEQ ID
NO: 128)
HUMHPA1B_PEA_1_node_86 (SEQ ID
NO: 129)
HUMHPA1B_PEA_1_node_87 (SEQ ID
NO: 130)

[0057] According to preferred embodiments of the present invention, there is provided an amino acid sequence comprising a sequence from the table below:

Protein Name

HUMHPA1B_PEA_1_P61 (SEQ ID NO: 133)
HUMHPA1B_PEA_1_P62 (SEQ ID NO: 134)
HUMHPA1B_PEA_1_P64 (SEQ ID NO: 135)
HUMHPA1B_PEA_1_P65 (SEQ ID NO: 136)
HUMHPA1B_PEA_1_P68 (SEQ ID NO: 137)
HUMHPA1B_PEA_1_P72 (SEQ ID NO: 138)
HUMHPA1B_PEA_1_P75 (SEQ ID NO: 139)
HUMHPA1B_PEA_1_P76 (SEQ ID NO: 140)
HUMHPA1B_PEA_1_P81 (SEQ ID NO: 141)
HUMHPA1B_PEA_1_P83 (SEQ ID NO: 142)
HUMHPA1B_PEA_1_P106 (SEQ ID
NO: 143)
HUMHPA1B_PEA_1_P107 (SEQ ID
NO: 144)
HUMHPA1B_PEA_1_P115 (SEQ ID
NO: 145)

[0058] According to preferred embodiments of the present invention, there is provided a nucleic acid sequence comprising a sequence from the table below; and/or

Transcript Name

HSHGFR_T1 (SEQ ID NO: 146)
HSHGFR_T6 (SEQ ID NO: 147)
HSHGFR_T8 (SEQ ID NO: 148)
HSHGFR_T13 (SEQ ID NO: 149)
HSHGFR_T14 (SEQ ID NO: 150)

[0059] a nucleic acid sequence comprising a sequence from the table below:

Segment Name

HSHGFR_node_2 (SEQ ID NO: 151)
HSHGFR_node_2 (SEQ ID NO: 152)
HSHGFR_node_6 (SEQ ID NO: 153)
HSHGFR_node_11 (SEQ ID NO: 154)
HSHGFR_node_15 (SEQ ID NO: 155)
HSHGFR_node_16 (SEQ ID NO: 156)
HSHGFR_node_18 (SEQ ID NO: 157)
HSHGFR_node_22 (SEQ ID NO: 158)
HSHGFR_node_24 (SEQ ID NO: 159)
HSHGFR_node_8 (SEQ ID NO: 160)
HSHGFR_node_10 (SEQ ID NO: 161)
HSHGFR_node_14 (SEQ ID NO: 162)
HSHGFR_node_20 (SEQ ID NO: 163)

[0060] According to preferred embodiments of the present invention, there is provided an amino acid sequence comprising a sequence from the table below:

Protein Name

HSHGFR_P6 (SEQ ID NO: 165)
HSHGFR_P11 (SEQ ID NO: 166)
HSHGFR_P12 (SEQ ID NO: 167)
HSHGFR_P13 (SEQ ID NO: 168)

[0061] According to preferred embodiments of the present invention, there is provided a nucleic acid sequence comprising a sequence from the table below; and/or

Transcript Name

S56892_PEA_1_T3 (SEQ ID NO: 169)
S56892_PEA_1_T9 (SEQ ID NO: 170)
S56892_PEA_1_T10 (SEQ ID NO: 171)
S56892_PEA_1_T13 (SEQ ID NO: 172)

[0062] a nucleic acid sequence comprising a sequence from the table below:

Segment Name

S56892_PEA_1_node_0 (SEQ ID NO: 173)
S56892_PEA_1_node_5 (SEQ ID NO: 174)
S56892_PEA_1_node_10 (SEQ ID NO: 175)
S56892_PEA_1_node_18 (SEQ ID NO: 176)
S56892_PEA_1_node_21 (SEQ ID NO: 177)
S56892_PEA_1_node_3 (SEQ ID NO: 178)
S56892_PEA_1_node_4 (SEQ ID NO: 179)
S56892_PEA_1_node_6 (SEQ ID NO: 180)
S56892_PEA_1_node_7 (SEQ ID NO: 181)
S56892_PEA_1_node_8 (SEQ ID NO: 182)
S56892_PEA_1_node_9 (SEQ ID NO: 183)
S56892_PEA_1_node_12 (SEQ ID NO: 184)
S56892_PEA_1_node_13 (SEQ ID NO: 185)
S56892_PEA_1_node_14 (SEQ ID NO: 186)
S56892_PEA_1_node_16 (SEQ ID NO: 187)
S56892_PEA_1_node_17 (SEQ ID NO: 188)
S56892_PEA_1_node_19 (SEQ ID NO: 189)
S56892_PEA_1_node_20 (SEQ ID NO: 190)
S56892_PEA_1_node_22 (SEQ ID NO: 191)
S56892_PEA_1_node_23 (SEQ ID NO: 192)

[0063] According to preferred embodiments, there is provided an amino acid sequence comprising a sequence from the table below:

Protein Name

S56892_PEA_1_P2 (SEQ ID NO: 194)
S56892_PEA_1_P8 (SEQ ID NO: 195)
S56892_PEA_1_P9 (SEQ ID NO: 196)
S56892_PEA_1_P11 (SEQ ID NO: 197)

[0064] According to preferred embodiments of the present invention, there is provided a nucleic acid sequence comprising a sequence from the table below; and/or

Transcript Name

HSIGFACI_PEA_1_T9 (SEQ ID NO: 198)
HSIGFACI_PEA_1_T10 (SEQ ID NO: 199)
HSIGFACI_PEA_1_T12 (SEQ ID NO: 200)
HSIGFACI_PEA_1_T15 (SEQ ID NO: 201)
HSIGFACI_PEA_1_T16 (SEQ ID NO: 202)
HSIGFACI_PEA_1_T17 (SEQ ID NO: 203)

[0065] a nucleic acid sequence comprising a sequence from the table below:

Segment Name

HSIGFACI_PEA_1_node_0 (SEQ ID NO: 204)
HSIGFACI_PEA_1_node_2 (SEQ ID NO: 205)
HSIGFACI_PEA_1_node_6 (SEQ ID NO: 206)
HSIGFACI_PEA_1_node_9 (SEQ ID NO: 207)
HSIGFACI_PEA_1_node_11 (SEQ ID
NO: 208)
HSIGFACI_PEA_1_node_14 (SEQ ID
NO: 209)
HSIGFACI_PEA_1_node_19 (SEQ ID
NO: 210)
HSIGFACI_PEA_1_node_20 (SEQ ID
NO: 211)
HSIGFACI_PEA_1_node_21 (SEQ ID
NO: 212)
HSIGFACI_PEA_1_node_24 (SEQ ID
NO: 213)
HSIGFACI_PEA_1_node_25 (SEQ ID
NO: 214)
HSIGFACI_PEA_1_node_26 (SEQ ID
NO: 215)
HSIGFACI_PEA_1_node_27 (SEQ ID
NO: 216)
HSIGFACI_PEA_1_node_13 (SEQ ID
NO: 217)
HSIGFACI_PEA_1_node_22 (SEQ ID
NO: 218)
HSIGFACI_PEA_1_node_23 (SEQ ID
NO: 219)

[0066] According to preferred embodiments of the present invention, there is provided an amino acid sequence comprising a sequence from the table below:

Protein Name

HSIGFACI_PEA_1_P5 (SEQ ID NO: 225)
HSIGFACI_PEA_1_P2 (SEQ ID NO: 226)
HSIGFACI_PEA_1_P6 (SEQ ID NO: 227)
HSIGFACI_PEA_1_P1 (SEQ ID NO: 228)
HSIGFACI_PEA_1_P7 (SEQ ID NO: 229)
HSIGFACI_PEA_1_P8 (SEQ ID NO: 230)

[0067] According to preferred embodiments of the present invention, there is provided a nucleic acid sequence comprising a sequence from the table below; and/or

Transcript Name
HSSTROMR_PEA_1_T3 (SEQ ID NO: 231)

[0068] a nucleic acid sequence comprising a sequence from the table below:

Segment Name

HSSTROMR_PEA_1_node_0 (SEQ ID
NO: 232)
HSSTROMR_PEA_1_node_5 (SEQ ID
NO: 233)
HSSTROMR_PEA_1_node_7 (SEQ ID
NO: 234)
HSSTROMR_PEA_1_node_9 (SEQ ID
NO: 235)
HSSTROMR_PEA_1_node_13 (SEQ ID
NO: 236)
HSSTROMR_PEA_1_node_16 (SEQ ID
NO: 237)
HSSTROMR_PEA_1_node_18 (SEQ ID
NO: 238)
HSSTROMR_PEA_1_node_20 (SEQ ID
NO: 239)
HSSTROMR_PEA_1_node_28 (SEQ ID
NO: 240)
HSSTROMR_PEA_1_node_14 (SEQ ID
NO: 241)
HSSTROMR_PEA_1_node_22 (SEQ ID
NO: 242)

[0069] According to preferred embodiments of the present invention, there is provided an amino acid sequence comprising a sequence from the table below:

Protein Name

HSSTROMR_PEA_1_P4 (SEQ ID NO: 244)

[0070] According to preferred embodiments of the present invention, there is provided a nucleic acid sequence comprising a sequence from the table below; and/or

Transcript Name

HUM4COLA_PEA_1_T1 (SEQ ID NO: 245)
HUM4COLA_PEA_1_T5 (SEQ ID NO: 246)
HUM4COLA_PEA_1_T6 (SEQ ID NO: 247)

[0071] a nucleic acid sequence comprising a sequence from the table below:

Segment Name

HUM4COLA_PEA_1_node_0 (SEQ ID
NO: 248)
HUM4COLA_PEA_1_node_0 (SEQ ID
NO: 249)
HUM4COLA_PEA_1_node_4 (SEQ ID
NO: 250)
HUM4COLA_PEA_1_node_7 (SEQ ID
NO: 251)
HUM4COLA_PEA_1_node_11 (SEQ ID
NO: 252)
HUM4COLA_PEA_1_node_19 (SEQ ID
NO: 253)
HUM4COLA_PEA_1_node_40 (SEQ ID
NO: 254)
HUM4COLA_PEA_1_node_41 (SEQ ID
NO: 255)
HUM4COLA_PEA_1_node_8 (SEQ ID
NO: 256)
HUM4COLA_PEA_1_node_9 (SEQ ID
NO: 257)
HUM4COLA_PEA_1_node_10 (SEQ ID
NO: 258)
HUM4COLA_PEA_1_node_12 (SEQ ID
NO: 259)
HUM4COLA_PEA_1_node_13 (SEQ ID
NO: 260)
HUM4COLA_PEA_1_node_16 (SEQ ID
NO: 261)
HUM4COLA_PEA_1_node_17 (SEQ ID
NO: 262)
HUM4COLA_PEA_1_node_22 (SEQ ID
NO: 263)
HUM4COLA_PEA_1_node_23 (SEQ ID
NO: 264)
HUM4COLA_PEA_1_node_24 (SEQ ID
NO: 265)
HUM4COLA_PEA_1_node_25 (SEQ ID
NO: 266)
HUM4COLA_PEA_1_node_26 (SEQ ID
NO: 267)
HUM4COLA_PEA_1_node_27 (SEQ ID
NO: 268)
HUM4COLA_PEA_1_node_29 (SEQ ID
NO: 269)
HUM4COLA_PEA_1_node_30 (SEQ ID
NO: 270)
HUM4COLA_PEA_1_node_32 (SEQ ID
NO: 271)
HUM4COLA_PEA_1_node_33 (SEQ ID
NO: 272)
HUM4COLA_PEA_1_node_36 (SEQ ID
NO: 273)
HUM4COLA_PEA_1_node_37 (SEQ ID
NO: 274)

[0072] According to preferred embodiments of the present invention, there is provided an amino acid sequence comprising a sequence from the table below:

Protein Name

HUM4COLA_PEA_1_P7 (SEQ ID NO: 276)
HUM4COLA_PEA_1_P14 (SEQ ID NO: 277)
HUM4COLA_PEA_1_P15 (SEQ ID NO: 278)

[0073] According to preferred embodiments of the present invention, there is provided a nucleic acid sequence comprising a sequence from the table below; and/or

Transcript Name

HUMICAMA1A_PEA_1_T2 (SEQ ID
NO: 279)
HUMICAMA1A_PEA_1_T4 (SEQ ID
NO: 280)
HUMICAMA1A_PEA_1_T5 (SEQ ID
NO: 281)
HUMICAMA1A_PEA_1_T8 (SEQ ID
NO: 282)
HUMICAMA1A_PEA_1_T12 (SEQ ID
NO: 283)
HUMICAMA1A_PEA_1_T16 (SEQ ID
NO: 284)

[0074] a nucleic acid sequence comprising a sequence from the table below:

Segment Name

HUMICAMA1A_PEA_1_node_0 (SEQ ID
NO: 285)
HUMICAMA1A_PEA_1_node_3 (SEQ ID
NO: 286)
HUMICAMA1A_PEA_1_node_12 (SEQ ID
NO: 287)
HUMICAMA1A_PEA_1_node_13 (SEQ ID
NO: 288)
HUMICAMA1A_PEA_1_node_14 (SEQ ID
NO: 289)
HUMICAMA1A_PEA_1_node_20 (SEQ ID
NO: 290)
HUMICAMA1A_PEA_1_node_21 (SEQ ID
NO: 291)
HUMICAMA1A_PEA_1_node_24 (SEQ ID
NO: 292)
HUMICAMA1A_PEA_1_node_25 (SEQ ID
NO: 293)
HUMICAMA1A_PEA_1_node_27 (SEQ ID
NO: 294)
HUMICAMA1A_PEA_1_node_29 (SEQ ID
NO: 295)
HUMICAMA1A_PEA_1_node_2 (SEQ ID
NO: 296)
HUMICAMA1A_PEA_1_node_4 (SEQ ID
NO: 297)
HUMICAMA1A_PEA_1_node_15 (SEQ ID
NO: 298)
HUMICAMA1A_PEA_1_node_16 (SEQ ID
NO: 299)
HUMICAMA1A_PEA_1_node_17 (SEQ ID
NO: 300)
HUMICAMA1A_PEA_1_node_18 (SEQ ID
NO: 301)
HUMICAMA1A_PEA_1_node_19 (SEQ ID
NO: 302)
HUMICAMA1A_PEA_1_node_22 (SEQ ID
NO: 303)
HUMICAMA1A_PEA_1_node_23 (SEQ ID
NO: 304)
HUMICAMA1A_PEA_1_node_26 (SEQ ID
NO: 305)
HUMICAMA1A_PEA_1_node_28 (SEQ ID
NO: 306)

[0075] According to preferred embodiments of the present invention, there is provided an amino acid sequence comprising a sequence from the table below:

Protein Name

HUMICAMA1A_PEA_1_P2 (SEQ ID
NO: 309)
HUMICAMA1A_PEA_1_P5 (SEQ ID
NO: 310)
HUMICAMA1A_PEA_1_P8 (SEQ ID
NO: 311)
HUMICAMA1A_PEA_1_P15 (SEQ ID
NO: 312)

[0076] According to preferred embodiments of the present invention, there is provided a nucleic acid sequence comprising a sequence from the table below; and/or

Transcript Name

HUMLYSYL_PEA_1_T2 (SEQ ID NO: 313)
HUMLYSYL_PEA_1_T4 (SEQ ID NO: 314)
HUMLYSYL_PEA_1_T5 (SEQ ID NO: 315)
HUMLYSYL_PEA_1_T6 (SEQ ID NO: 316)
HUMLYSYL_PEA_1_T8 (SEQ ID NO: 317)
HUMLYSYL_PEA_1_T9 (SEQ ID NO: 318)
HUMLYSYL_PEA_1_T19 (SEQ ID NO: 319)
HUMLYSYL_PEA_1_T20 (SEQ ID NO: 320)
HUMLYSYL_PEA_1_T22 (SEQ ID NO: 321)
HUMLYSYL_PEA_1_T24 (SEQ ID NO: 322)

[0077] a nucleic acid sequence comprising a sequence from the table below:

Segment Name

HUMLYSYL_PEA_1_node_6 (SEQ ID
NO: 323)
HUMLYSYL_PEA_1_node_14 (SEQ ID
NO: 324)
HUMLYSYL_PEA_1_node_19 (SEQ ID
NO: 325)
HUMLYSYL_PEA_1_node_38 (SEQ ID
NO: 326)
HUMLYSYL_PEA_1_node_55 (SEQ ID
NO: 327)
HUMLYSYL_PEA_1_node_59 (SEQ ID
NO: 328)
HUMLYSYL_PEA_1_node_61 (SEQ ID
NO: 329)
HUMLYSYL_PEA_1_node_62 (SEQ ID
NO: 330)
HUMLYSYL_PEA_1_node_65 (SEQ ID
NO: 331)
HUMLYSYL_PEA_1_node_71 (SEQ ID
NO: 332)
HUMLYSYL_PEA_1_node_72 (SEQ ID
NO: 333)
HUMLYSYL_PEA_1_node_3 (SEQ ID
NO: 334)
HUMLYSYL_PEA_1_node_4 (SEQ ID
NO: 335)
HUMLYSYL_PEA_1_node_8 (SEQ ID
NO: 336)
HUMLYSYL_PEA_1_node_10 (SEQ ID
NO: 337)
HUMLYSYL_PEA_1_node_11 (SEQ ID
NO: 338)
HUMLYSYL_PEA_1_node_12 (SEQ ID
NO: 339)
HUMLYSYL_PEA_1_node_16 (SEQ ID
NO: 340)
HUMLYSYL_PEA_1_node_20 (SEQ ID
NO: 341)
HUMLYSYL_PEA_1_node_23 (SEQ ID
NO: 342)
HUMLYSYL_PEA_1_node_25 (SEQ ID
NO: 343)
HUMLYSYL_PEA_1_node_28 (SEQ ID
NO: 344)
HUMLYSYL_PEA_1_node_30 (SEQ ID
NO: 345)
HUMLYSYL_PEA_1_node_31 (SEQ ID
NO: 346)
HUMLYSYL_PEA_1_node_33 (SEQ ID
NO: 347)
HUMLYSYL_PEA_1_node_34 (SEQ ID
NO: 348)
HUMLYSYL_PEA_1_node_36 (SEQ ID
NO: 349)
HUMLYSYL_PEA_1_node_40 (SEQ ID
NO: 350)
HUMLYSYL_PEA_1_node_41 (SEQ ID
NO: 351)
HUMLYSYL_PEA_1_node_42 (SEQ ID
NO: 352)
HUMLYSYL_PEA_1_node_44 (SEQ ID
NO: 353)
HUMLYSYL_PEA_1_node_45 (SEQ ID
NO: 354)
HUMLYSYL_PEA_1_node_46 (SEQ ID
NO: 355)
HUMLYSYL_PEA_1_node_48 (SEQ ID
NO: 356)
HUMLYSYL_PEA_1_node_49 (SEQ ID
NO: 357)
HUMLYSYL_PEA_1_node_52 (SEQ ID
NO: 358)
HUMLYSYL_PEA_1_node_53 (SEQ ID
NO: 359)
HUMLYSYL_PEA_1_node_56 (SEQ ID
NO: 360)
HUMLYSYL_PEA_1_node_63 (SEQ ID
NO: 361)
HUMLYSYL_PEA_1_node_64 (SEQ ID
NO: 362)
HUMLYSYL_PEA_1_node_66 (SEQ ID
NO: 363)
HUMLYSYL_PEA_1_node_67 (SEQ ID
NO: 364)
HUMLYSYL_PEA_1_node_68 (SEQ ID
NO: 365)
HUMLYSYL_PEA_1_node_70 (SEQ ID
NO: 366)

[0078] According to preferred embodiments of the present invention, there is provided an amino acid sequence comprising a sequence from the table below:

Pretein Name

HUMLYSYL_PEA_1_P2 (SEQ ID NO: 369)
HUMLYSYL_PEA_1_P4 (SEQ ID NO: 370)
HUMLYSYL_PEA_1_P5 (SEQ ID NO: 371)
HUMLYSYL_PEA_1_P6 (SEQ ID NO: 372)
HUMLYSYL_PEA_1_P7 (SEQ ID NO: 373)
HUMLYSYL_PEA_1_P13 (SEQ ID NO: 374)
HUMLYSYL_PEA_1_P14 (SEQ ID NO: 375)
HUMLYSYL_PEA_1_P16 (SEQ ID NO: 376)
HUMLYSYL_PEA_1_P18 (SEQ ID NO: 377)
HUMLYSYL_PEA_1_P24 (SEQ ID NO: 378)

[0079] According to preferred embodiments of the present invention, preferably any of the above nucleic acid and/or amino acid sequences further comprises any sequence having at least about 70%, preferably at least about 80%, more preferably at least about 90%, most preferably at least about 95% homology thereto.

[0080] According to preferred embodiments of the present invention, there is provided an isolated chimeric polypeptide encoding for HUMLYSYL_PEA_{—}1_P2 (SEQ ID NO:369), comprising a first amino acid sequence being at least 90% homologous to MRPLLLLALLGWLLLAEAKGDAKPEDNLLVLTVATKETEGFRRFKRSAQFFNYKIQAL GLGEDWNVEKGTSAGGGQKVRLLKKALEKHADKEDLVILFADSYDVLFASGPRELLK KFRQARSQVVFSAEELIYPDRRLETKYPVVSDGKRFLGSGGFIGYAPNLSKLVAEWEGQ DSDSDQLFYTKIFLDPEKREQINITLDHRCRIFQNLDGALDEVVLKFEMGHVRARNLAY DTLPVLIHGNGPTKLQLNYLGNYIPRFWTFETGCTVCDEGLRSLKGIGDEALPTVLVGV FIEQPTPFVSLFFQRLLRLHYPQKHMRLFIHNHEQHHKAQVEEFLAQHGSEYQSVKLVG PEVRMANADARNMGADLCRQDRSCTYYFSVDADVALTEPNSLRLLIQQNKNVIAPLM TRHGRLWSNFWGALSADGYYARSEDYVDIVQGRRVGVWNVPYISNIYLIKGSALRGEL QSSDLFHHSKLDPDMAFCANIRQQ corresponding to amino acids 1-490 of PLO1_HUMAN_V1 (SEQ ID NO:368), which also corresponds to amino acids 1-490 of HUMLYSYL_PEA_{—}1_P2 (SEQ ID NO:369), and a second amino acid sequence being at least 70%, optionally at least 80%, preferably at least 85%, more preferably at least 90% and most preferably at least 95% homologous to a polypeptide having the sequence VSQERAAQDALWMGQAGRMCSCS (SEQ ID NO:474) corresponding to amino acids 491-513 of HUMLYSYL_PEA_{—}1_P2 (SEQ ID NO:369), wherein said first amino acid sequence and second amino acid sequence are contiguous and in a sequential order.

[0081] According to preferred embodiments of the present invention, there is provided an isolated polypeptide encoding for a tail of HUMLYSYL_PEA_{—}1_P2 (SEQ ID NO:369), comprising a polypeptide being at least 70%, optionally at least about 80%, preferably at least about 85%, more preferably at least about 90% and most preferably at least about 95% homologous to the sequence VSQERAAQDALWMGQAGRMCSCS (SEQ ID NO:474) in HUMLYSYL_PEA_{—}1_P2 (SEQ ID NO:369).

[0082] According to preferred embodiments of the present invention, there is provided an isolated chimeric polypeptide encoding for HUMLYSYL_PEA_{—}1_P4 (SEQ ID NO:370), comprising a first amino acid sequence being at least 90% homologous to MRPLLLLALLGWLLLAEAKGDAKPE corresponding to amino acids 1-25 of PLO1_HUMAN_V1 (SEQ ID NO:3681, which also corresponds to amino acids 1-25 of HUMLYSYL_PEA_{—}1_P4 (SEQ ID NO:370), a second amino acid sequence being at least 70%, optionally at least 80%, preferably at least 85%, more preferably at least 90% and most preferably at least 95% homologous to a polypeptide having the sequence APCCQEGLRAGGSGSLHLGRDFTVLAGARGSPSPSVSSIPRFWIPGS (SEQ ID NO:504) corresponding to amino acids 26-72 of HUMLYSYL_PEA_{—}1_P4 (SEQ ID NO:370), and a third amino acid sequence being at least 90% homologous to DNLLVLTVATKETEGFRRFKRSAQFFNYKIQALGLGEDWNVEKGTSAGGGQKVRLLK KALEKHADKEDLVILFADSYDVLFASGPRELLKKFRQARSQVVFSAEELIYPDRRLETK YPVVSDGKRFLGSGGFIGYAPNLSKLVAEWEGQDSDSDQLFYTKIFLDPEKREQINITLD HRCRIFQNLDGALDEVVLKFEMGHVRARNLAYDTLPVLIHGNGPTKLQLNYLGNYIPR FWTFETGCTVCDEGLRSLKGIGDEALPTVLVGVFIEQPTPFVSLFFQRLLRLHYPQKHMR LFIHNHEQHHKAQVEEFLAQHGSEYQSVKLVGPEVRMANADARNMGADLCRQDRSCT YYFSVDADVALTEPNSLRLLIQQNKNVIAPLMTRHGRLWSNFWGALSADGYYARSED YVDIVQGRRVGVWNVPYISNIYLIKGSALRGELQSSDLFHHSKLDPDMAFCANIRQQDV FMFLTNRHTLGHLLSLDSYRTTHLHNDLWEVFSNPEDWKEKYIHQNYTKALAGKLVET PCPDVYWFPIFTEVACDELVEEMEHFGQWSLGNNKDNRIQGGYENVPTIDIHMNQIGFE REWHKFLLEYIAPMTEKLYPGYYTRAQFDLAFVVRYKPDEQPSLMPHHDASTFTINIAL NRVGVDYEGGGCRFLRYNCSIRAPRKGWTLMHPGRLTHYHEGLPTTRGTRYIAVSFVD P corresponding to amino acids 26-727 of PLO1_HUMAN_V1 (SEQ ID NO:368), which also corresponds to amino acids 73-774 of HUMLYSYL_PEA_{—}1_P4 (SEQ ID NO:370), wherein said first amino acid sequence, second amino acid sequence and third amino acid sequence are contiguous and in a sequential order.

[0083] According to preferred embodiments of the present invention, there is provided an isolated polypeptide encoding for an edge portion of HUMLYSYL_PEA_{—}1_P4 (SEQ ID NO:370), comprising an amino acid sequence being at least 70%, optionally at least about 80%, preferably at least about 85%, more preferably at least about 90% and most preferably at least about 95% homologous to the sequence encoding for APCCQEGLRAGGSGSLHLGRDFTVLAGARGSPSPSVSSIPRFWIPGS (SEQ ID NO:504), corresponding to HUMLYSYL_PEA_{—}1_P4 (SEQ ID NO:370).

[0084] According to preferred embodiments of the present invention, there is provided an isolated chimeric polypeptide encoding for HUMLYSYL_PEA_{—}1_P5 (SEQ ID NO:371), comprising a first amino acid sequence being at least 90% homologous to MRPLLLLALLGWLLLAEAKGDAKPEDNLLVLTVATKETEGFRRFKRSAQFFNYKIQAL GLGEDWNVEKGTSAGGGQKVRLLKKALEKHADKEDLVILFADSYDVLFASGPRELLK KFRQARSQVVFSAEELIYPDRRLETKYPVVSDGKRFLGSGGFIGYAPNLSKLVAEWEGQ DSDSDQLFYTKIFLDPEKREQINITLDHRCRIFQNLDGALDEVVLKFEMGHVRARNLAY DTLPVLIHGNGPTKLQLNYLGNYIPRFWTFETGCTVCDEGLRSLKGIG corresponding to amino acids 1-281 of PLO1_HUMAN_V1 (SEQ ID NO:368), which also corresponds to amino acids 1-281 of HUMLYSYL_PEA_{—}1_P5 (SEQ ID NO:371), and a second amino acid sequence being at least 90% homologous to RLLRLHYPQKHMRLFIHNHEQHHKAQVEEFLAQHGSEYQSVKLVGPEVRMANADARN MGADLCRQDRSCTYYFSVDADVALTEPNSLRLLIQQNKNVIAPLMTRHGRLWSNFWG ALSADGYYARSEDYVDIVQGRRVGVWNVPYISNIYLIKGSALRGELQS SDLFHHSKLDP DMAFCANIRQQDVFMFLTNRHTLGHLLSLDSYRTTHLHNDLWEVFSNPEDWKEKYIH QNYTKALAGKLVETPCPDVYWFPIFTEVACDELVEEMEHFGQWSLGNNKDNRIQGGY ENVPTIDIHMNQIGFEREWHKFLLEYIAPMTEKLYPGYYTRAQFDLAFVVRYKPDEQPS LMPHHDASTFTINIALNRVGVDYEGGGCRFLRYNCSIRAPRKGWTLMHPGRLTHYHEG LPTTRGTRYIAVSFVDP corresponding to amino acids 307-727 of PLO1_HUMAN_V1 (SEQ ID NO:368), which also corresponds to amino acids 282-702 of HUMLYSYL_PEA_{—}1_P5 (SEQ ID NO:371), wherein said first amino acid sequence and second amino acid sequence are contiguous and in a sequential order.

[0085] According to preferred embodiments of the present invention, there is provided an isolated chimeric polypeptide encoding for an edge portion of HUMLYSYL_PEA_{—}1_P5 (SE ID NO:371), comprising a polypeptide having a length “n”, wherein n is at least about 10 amino acids in length, optionally at least about 20 amino acids in length, preferably at least about 30 amino acids in length, more preferably at least about 40 amino acids in length and most preferably at least about 50 amino acids in length, wherein at least two amino acids comprise GR, having a structure as follows: a sequence starting from any of amino acid numbers 281−x to 281; and ending at any of amino acid numbers 282+((n−2)−x), in which x varies from 0 to n−2.

[0086] According to preferred embodiments of the present invention, there is provided an isolated chimeric polypeptide encoding for HUMLYSYL_PEA_{—}1_P6 (SEQ ID NO:372), comprising a first amino acid sequence being at least 90% homologous to MRPLLLLALLGWLLLAEAKGDAKPEDNLLVLTVATKETEGFRRFKRSAQFFNYKI corresponding to amino acids 1-55 of PLO1_HUMAN_V1 (SEQ ID NO:368), which also corresponds to amino acids 1-55 of HUMLYSYL_PEA_{—}1_P6 (SEQ ID NO:372), a second amino acid sequence being at least 70%, optionally at least 80%, preferably at least 85%, more preferably at least 90% and most preferably at least 95% homologous to a polypeptide having the sequence QPVLRGVSL (SEQ ID NO:505) corresponding to amino acids 56-64 of HUMLYSYL_PEA_{—}1_P6 (SEQ ID NO:372), and a third amino acid sequence being at least 90% homologous to QALGLGEDWNVEKGTSAGGGQKVRLLKKALEKHADKEDLVILFADSYDVLFASGPRE LLKKFRQARSQVVFSAEELIYPDRRLETKYPVVSDGKRFLGSGGFIGYAPNLSKLVAEW EGQDSDSDQLFYTKIFLDPEKREQINITLDHRCRIFQNLDGALDEVVLKFEMGHVRARN LAYDTLPVLIHGNGPTKLQLNYLGNYIPRFWTFETGCTVCDEGLRSLKGIGDEALPTVL VGVFIEQPTPFVSLFFQRLLRLHYPQKHMRLFIHNHEQHHKAQVEEFLAQHGSEYQSVK LVGPEVRMANADARNMGADLCRQDRSCTYYFSVDADVALTEPNSLRLLIQQNKNVIA PLMTRHGRLWSNFWGALSADGYYARSEDYVDIVQGRRVGVWNVPYISNIYLIKGSALR GELQS SDLFHHSKLDPDMAFCANIRQQDVFMFLTNRHTLGHLLSLDSYRTTHLHNDLW EVFSNPEDWKEKYIHQNYTKALAGKLVETPCPDVYWFPIFTEVACDELVEEMEHFGQW SLGNNKDNRIQGGYENVPTIDIHMNQIGFEREWHKFLLEYIAPMTEKLYPGYYTRAQFD LAFVVRYKPDEQPSLMPHHDASTFTINIALNRVGVDYEGGGCRFLRYNCSIAAPRKGW TLMHPGRLTHYHEGLPTTRGTRYIAVSFVDP corresponding to amino acids 56-727 of PLO1_HUMAN_V1 (SEQ ID NO:368), which also corresponds to amino acids 65-736 of HUMLYSYL_PEA_{—}1_P6 (SEQ ID NO:372), wherein said first amino acid sequence, second amino acid sequence and third amino acid sequence are contiguous and in a sequential order.

[0087] According to preferred embodiments of the present invention, there is provided an isolated polypeptide encoding for an edge portion of HUMLYSYL_PEA_{—}1_P6 (SEQ ID NO:372), comprising an amino acid sequence being at least 70%, optionally at least about 80%, preferably at least about 85%, more preferably at least about 90% and most preferably at least about 95% homologous to the sequence encoding for QPVLRGVSL (SEQ ID NO:505), corresponding to HUMLYSYL_PEA_{—}1_P6 (SEQ ID NO:372).

[0088] According to preferred embodiments of the present invention, there is provided an isolated chimeric polypeptide encoding for HUMLYSYL_PEA_{—}1_P7 (SEQ ID NO:373), comprising a first amino acid sequence being at least 90% homologous to MRPLLLLALLGWLLLAEAKGDAKPEDNLLVLTVATKETEGFRRFKRSAQFFNYKIQAL GLGEDWNVEKGTSAGGGQKVRLLKKALEKHADKEDLVILFADSYDVLFASGPRELLK KFRQARSQVVFSAEELIYPDRRLETKYPVVSDGKRFLGSGGFIGYAPNLSKLVAEWEGQ DSDSDQLFYTKIFLDPEKREQINITLDHRCRIFQNLDGAL corresponding to amino acids 1-214 of PLO1_HUMAN_V1 (SEQ ID NO:368), which also corresponds to amino acids 1-214 of HUMLYSYL_PEA_{—}1_P7 (SEQ ID NO:373), a second amino acid sequence being at least 70%, optionally at least 80%, preferably at least 85%, more preferably at least 90% and most preferably at least 95% homologous to a polypeptide having the sequence VSPWGQGHLPGACYELTASVLTSELSVMPSFPA (SEQ ID NO:506) corresponding to amino acids 215-247 of HUMLYSYL_PEA_{—}1_P7 (SEQ ID NO:373), a third amino acid sequence being at least 90% homologous to VV corresponding to amino acids 217-218 of PLO1_HUMAN_V1 (SEQ ID NO:368), which also corresponds to amino acids 248-249 of HUMLYSYL_PEA_{—}1_P7 (SEQ ID NO:373), and a fourth amino acid sequence being at least 90% homologous to LQLNYLGNYIPRFWTFETGCTVCDEGLRSLKGIGDEALPTVLVGVFIEQPTPFVSLFFQR LLRLHYPQKHMRLFIHNHEQHHKAQVEEFLAQHGSEYQSVKLVGPEVRMANADARN MGADLCRQDRSCTYYFSVDADVALTEPNSLRLLIQQNKNVIAPLMTRHGRLWSNFWG ALSADGYYARSEDYVDIVQGRRVGVWNVPYISNIYLIKGSALRGELQS SDLFHHSKLDP DMAFCANIRQQDVFMFLTNRHTLGHLLSLDSYRTTHLHNDLWEVFSNPEDWKEKYIH QNYTKALAGKLVETPCPDVYWFPIFTEVACDELVEEMEHFGQWSLGNNKDNRIQGGY ENVPTIDIHMNQIGFEREWHKFLLEYIAPMTEKLYPGYYTRAQFDLAFVVRYKPDEQPS LMPHHDASTFTINIALNRVGVDYEGGGCRFLRYNCSIRAPRKGWTLMHPGRLTHYHEG LPTTRGTRYIAVSFVDP corresponding to amino acids 248-727 of PLO1_HUMAN_V1 (SEQ ID NO:368), which also corresponds to amino acids 250-729 of HUMLYSYL_PEA_{—}1_P7 (SEQ ID NO:373), wherein said first amino acid sequence, second amino acid sequence, third amino acid sequence and fourth amino acid sequence are contiguous and in a sequential order.

[0089] According to preferred embodiments of the present invention, there is provided an isolated polypeptide encoding for an edge portion of HUMLYSYL_PEA_{—}1_P7 (SEQ ID NO:373), comprising an amino acid sequence being at least 70%, optionally at least about 80%, preferably at least about 85%, more preferably at least about 90% and most preferably at least about 95% homologous to the sequence encoding for VSPWGQGHLPGACYELTASVLTSELSVMPSFPA (SEQ ID NO:506), corresponding to HUMLYSYL_PEA_{—}1_P7 (SEQ ID NO:373).

[0090] According to preferred embodiments of the present invention, there is provided a bridge portion of HUMLYSYL_PEA_{—}1_P7 (SEQ ID NO:373), comprising a polypeptide having a length “n”, wherein n is at least about 10 amino acids in length, optionally at least about 20 amino acids in length, preferably at least about 30 amino acids in length, more preferably at least about 40 amino acids in length and most preferably at least about 50 amino acids in length, wherein at least two amino acids comprise LV, having a structure as follows (numbering according to HUMLYSYL_PEA_{—}1_P7 (SEQ ID NO:373)): a sequence starting from any of amino acid numbers 214−x to 214; and ending at any of amino acid numbers 215+((n−2)−x), in which x varies from 0 to n−2.

[0091] According to preferred embodiments of the present invention, there is provided an isolated chimeric polypeptide encoding for an edge portion of HUMLYSYL_PEA_{—}1_P7 (SEQ ID NO:373), comprising a polypeptide having a length “n”, wherein n is at least about 10 amino acids in length, optionally at least about 20 amino acids in length, preferably at least about 30 amino acids in length, more preferably at least about 40 amino acids in length and most preferably at least about 50 amino acids in length, wherein at least two amino acids comprise VL, having a structure as follows: a sequence starting from any of amino acid numbers 249−x to 249; and ending at any of amino acid numbers 250+((n−2)−x), in which x varies from 0 to n−2.

[0092] According to preferred embodiments of the present invention, there is provided an isolated chimeric polypeptide encoding for HUMLYSYL_PEA_{—}1_P13 (SEQ ID NO:374), comprising a first amino acid sequence being at least 90% homologous to MRPLLLLALLGWLLLAEAKGDAKPEDNLLVLTVATKETEGFRRFKRSAQFFNYKIQAL GLGEDWNVEKGTSAGGGQKVRLLKKALEKHADKEDLVILFADSYDVLFASGPRELLK KFRQARSQVVFSAEELIYPDRRLETKYPVVSDGKRFLGSGGFIGYAPNLSKLVAEWEGQ DSDSDQLFYTKIFLDPEKREQINITLDHRCRIFQNLDGALDEVVLKFEMGHVRARNLAY DTLPVLIHGNGPTKLQLNYLGNYIPRFWTFETGCTVCDEGLRSLKGIGDEALPTVLVGV FIEQPTPFVSLFFQRLLRLHYPQKHMRLFIHNHEQHHKAQVEEFLAQHGSEYQSVKLVG PEVRMANADARNMGADLCRQDRSCTYYFSVDADVALTEPNSLRLLIQQNKNVIAPLM TRHGRLWSNFWGALSADGYYARSEDYVDIVQGRRVGVWNVPYISNIYLIKGSALRGEL QSSDLFHHSKLDPDMAFCANIRQQDVFMFLTNRHTLGHLLSLDSYRTTHLHNDLWEVF SNPEDWKEKYIHQNYTKALAGKLVETPCPDVYWFPIFTEVACDELVEEMEHFGQWSLG NNK corresponding to amino acids 1-585 of PLO1_HUMAN_V1 (SEQ ID NO:368), which also corresponds to amino acids 1-585 of HUMLYSYL_PEA_{—}1_P13 (SEQ ID NO:374), and a second amino acid sequence being at least 70%, optionally at least 80%, preferably at least 85%, more preferably at least 90% and most preferably at least 95% homologous to a polypeptide having the sequence GCPESGTSASMAGHESKP (SEQ ID NO:475) corresponding to amino acids 586-603 of HUMLYSYL_PEA_{—}1_P13 (SEQ ID NO:374), wherein said first amino acid sequence and second amino acid sequence are contiguous and in a sequential order.

[0093] According to preferred embodiments of the present invention, there is provided an isolated polypeptide encoding for a tail of HUMLYSYL_PEA_{—}1_P13 (SEQ ID NO:374), comprising a polypeptide being at least 70%, optionally at least about 80%, preferably at least about 85%, more preferably at least about 90% and most preferably at least about 95% homologous to the sequence GCPESGTSASMAGHESKP (SEQ ID NO:475) in HUMLYSYL_PEA_{—}1_P13 (SEQ ID NO:374).

[0094] According to preferred embodiments of the present invention, there is provided an isolated chimeric polypeptide encoding for HUMLYSYL_PEA_{—}1_P14 (SEQ ID NO:375), comprising a first amino acid sequence being at least 90% homologous to MRPLLLLALLGWLLLAEAKGDAKPEDNLLVLTVATKETEGFRRFKRSAQFFNYKIQAL GLGEDWNVEKGTSAGGGQKVRLLKKALEKHADKEDLVILFADSYDVLFASGPRELLK KFRQARSQVVFSAEELIYPDRRLETKYPVVSDGKRFLGSGGFIGYAPNLSKLVAEWEGQ DSDSDQLFYTKIFLDPEKREQINITLDHRCRIFQNLDGALDEVVLKFEMGHVRARNLAY DTLPVLIHGNGPTKLQLNYLGNYIPRFWTFETGCTVCDEGLRSLKGIGDEALPTVLVGV FIEQPTPFVSLFFQRLLRLHYPQKHMRLFIHNHEQHHKAQVEEFLAQHGSEYQSVKLVG PEVRMANADARNMGADLCRQDRSCTYYFSVDADVALTEPNSLRLLIQQNKNVIAPLM TRHGRLWSNFWGALSADGYYARSEDYVDIVQGRRVGVWNVPYISNIYLIKGSALRGEL QSSDLFHHSKLDPDMAFCANIRQQDVFMFLTNRHTLGHLLSLDSYRTTHLHNDLWEVF SNPEDWKEKYIHQNYTKALAGKLVETPCPDVYWFPIFTEVACDELVEEMEHFGQWSLG NNK corresponding to amino acids 1-585 of PLO1_HUMAN_V1 (SEQ ID NO:368), which also corresponds to amino acids 1-585 of HUMLYSYL_PEA_{—}1_P14 (SEQ ID NO:375), and a second amino acid sequence being at least 70%, optionally at least 80%, preferably at least 85%, more preferably at least 90% and most preferably at least 95% homologous to a polypeptide having the sequence TATPENLLGDRRGICAQLDLLLACGEGSDRSTHHTGSPCPGCL (SEQ ID NO:476) corresponding to amino acids 586-628 of HUMLYSYL_PEA_{—}1_P14 (SEQ ID NO:375), wherein said first amino acid sequence and second amino acid sequence are contiguous and in a sequential order.

[0095] According to preferred embodiments of the present invention, there is provided an isolated polypeptide encoding for a tail of HUMLYSYL_PEA_{—}1_P14 (SEQ ID NO:375), comprising a polypeptide being at least 70%, optionally at least about 80%, preferably at least about 85%, more preferably at least about 90% and most preferably at least about 95% homologous to the sequence TATPENLLGDRRGICAQLDLLLACGEGSDRSTHHTGSPCPGCL (SEQ ID NO:476) in HUMLYSYL_PEA_{—}1_P14 (SEQ ID NO:375).

[0096] According to preferred embodiments of the present invention, there is provided an isolated chimeric polypeptide encoding for HUMLYSYL_PEA_{—}1_P16 (SEQ ID NO:376), comprising a first amino acid sequence being at least 90% homologous to MRPLLLLALLGWLLLAEAKGDAKPEDNLLVLTVATKETEGFRRFKRSAQFFNYKIQAL GLGEDWNVEKGTSAGGGQKVRLLKKALEKHADKEDLVILFADSYDVLFASGPRELLK KFRQARSQVVFSAEELIYPDRRLETKYPVVSDGKRFLGSGGFIGYAPNLSKLVAEWEGQ DSDSDQLFYTKIFLDPEKREQINITLDHRCRIFQNLDGALDEVVLKFEMGHVRARNLAY DTLPVLIHGNGPTKLQLNYLGNYIPRFWTFETGCTVCDEGLRSLKGIGDEALPTVLVGV FIEQPTPFVSLFFQRLLRLHYPQKHMRLFIHNHEQHHKAQVEEFLAQHGSEYQSVKLVG PEVRMANADARNMGADLCRQDRSCTYYFSVDADVALTEPNSLRLLIQQNKNVIAPLM TRHGRLWSNFWGALSADGYYARSEDYVDIVQGRRVGVWNVPYISNIYLIKGSALRGEL QSSDLFHHSKLDPDMAFCANIRQQDVFMFLTNRHTLGHLLSLDSYRTTHLHNDLWEVF SNPEDWKEKYIHQNYTKALAGKLVET corresponding to amino acids 1-550 of PLO1_HUMAN_V1 (SEQ ID NO:368), which also corresponds to amino acids 1-550 of HUMLYSYL_PEA_{—}1_P16 (SEQ ID NO:376), and a second amino acid sequence being at least 70%, optionally at least 80%, preferably at least 85%, more preferably at least 90% and most preferably at least 95% homologous to a polypeptide having the sequence VRAMDTLLDQPCLLQGAGHRRETACPGEWGTAGWEL (SEQ ID NO:477) corresponding to amino acids 551-586 of HUMLYSYL_PEA_{—}1_P16 (SEQ ID NO:376), wherein said first amino acid sequence and second amino acid sequence are contiguous and in a sequential order.

[0097] According to preferred embodiments of the present invention, there is provided an isolated polypeptide encoding for a tail of HUMLYSYL_PEA_{—}1_P16 (SEQ ID NO:376), comprising a polypeptide being at least 70%, optionally at least about 80%, preferably at least about 85%, more preferably at least about 90% and most preferably at least about 95% homologous to the sequence VRAMDTLLDQPCLLQGAGHRRETACPGEWGTAGWEL (SEQ ID NO:477) in HUMLYSYL_PEA_{—}1_P16 (SEQ ID NO:376).

[0098] According to preferred embodiments of the present invention, there is provided an isolated chimeric polypeptide encoding for HUMLYSYL_PEA_{—}1_P24 (SEQ ID NO:378), comprising a first amino acid sequence being at least 90% homologous to MRPLLLLALLGWLLLAEAKGDAKPEDNLLVLTVATKETEGFRRFKRSAQFFNYKIQAL GLGEDWNVEKGTSAGGGQKVRLLKKALEKHADKEDLVILFADSYDVLFASGPRELLK KFRQARSQVVFSAEELIYPDRRLETKYPVVSDGKRFLGSGGFIGYAPNLSKLVAEWEGQ DSDSDQLFYTKIFLDPEKR corresponding to amino acids 1-193 of PLO1_HUMAN_V1 (SEQ ID NO:368), which also corresponds to amino acids 1-193 of HUMLYSYL_PEA_{—}1_P24 (SEQ ID NO:378), and a second amino acid sequence being at least 70%, optionally at least 80%, preferably at least 85%, more preferably at least 90% and most preferably at least 95% homologous to a polypeptide having the sequence VSRLHS (SEQ ID NO:478) corresponding to amino acids 194-199 of HUMLYSYL_PEA_{—}1_P24 (SEQ ID NO:378), wherein said first amino acid sequence and second amino acid sequence are contiguous and in a sequential order.

[0099] According to preferred embodiments of the present invention, there is provided an isolated polypeptide encoding for a tail of HUMLYSYL_PEA_{—}1_P24 (SEQ ID NO:378), comprising a polypeptide being at least 70%, optionally at least about 80%, preferably at least about 85%, more preferably at least about 90% and most preferably at least about 95% homologous to the sequence VSRLHS (SEQ ID NO:478) in HUMLYSYL_PEA_{—}1_P24 (SEQ ID NO:378).

[0100] According to preferred embodiments of the present invention, there is provided an isolated chimeric polypeptide encoding for HUMICAMA1A_PEA_{—}1_P2 (SEQ ID NO:309), comprising a first amino acid sequence being at least 90% homologous to MAPSSPRPALPALLVLLGALFPGPGNAQTSVSPSKVILPRGGSVLVTCSTSCDQPKLLGIE TPLPKKELLLPGNNRKVYELSNVQEDSQPMCYSNCPDGQSTAKTFLTVYWTPERVELA PLPSWQPVGKNLTLRCQVEGGAPRANLTVVLLRGEKELKREPAVGEPAEVTTTVLVRR DHHGANFSCRTELDLRPQGLELFENTSAPYQLQTFVLPATPPQLVSPRVLEVDTQGTVV CSLDGLFPVSEAQVHLALGDQRLNPTVTYGNDSFSAKASVSVTAEDEGTQRLTCAVILG NQSQETLQTVTIYS corresponding to amino acids 1-309 of ICA1_HUMAN (SEQ ID NO:307), which also corresponds to amino acids 1-309 of HUMICAMA1A_PEA_{—}1_P2 (SEQ ID NO:309), and a second amino acid sequence being at least 70%, optionally at least 80%, preferably at least 85%, more preferably at least 90% and most preferably at least 95% homologous to a polypeptide having the sequence KKGQGRSGASWGCDLNPGRGSLCAYSRLSGAQRDSDEARGLRRDRGDSEV (SEQ ID NO:479) corresponding to amino acids 310-359 of HUMICAMA1A_PEA_{—}1_P2 (SEQ ID NO:309), wherein said first amino acid sequence and second amino acid sequence are contiguous and in a sequential order.

[0101] According to preferred embodiments of the present invention, there is provided an isolated polypeptide encoding for a tail of HUMICAMA1A_PEA_{—}1_P2 (SEQ ID NO:309), comprising a polypeptide being at least 70%, optionally at least about 80%, preferably at least about 85%, more preferably at least about 90% and most preferably at least about 95% homologous to the sequence KKGQGRSGASWGCDLNPGRGSLCAYSRLSGAQRDSDEARGLRRDRGDSEV (SEQ ID NO:479) in HUMICAMA1A_PEA_{—}1_P2 (SEQ ID NO:309).

[0102] According to preferred embodiments of the present invention, there is provided an isolated chimeric polypeptide encoding for HUMICAMA1A_PEA_{—}1_P5 (SEQ ID NO:310), comprising a first amino acid sequence being at least 90% homologous to MAPSSPRPALPALLVLLGALFPGPGNAQTSVSPSKVILPRGGSVLVTCSTSCDQPKLLGIE TPLPKKELLLPGNNRKVYELSNVQEDSQPMCYSNCPDGQSTAKTFLTVYWTPERVELA PLPSWQPVGKNLTLRCQVEGGAPRANLTVVLLRGEKELKREPAVGEPAEVTTTVLVRR DHHGANFSCRTELDLRPQGLELFENTSAPYQLQTFVLPATPPQLVSRVLEVDTQGTVVC SLDGLFPVSEAQVHLALGDQRLNPTVTYGNDSFSAKASVSVTAEDEGTQRLTCAVILGN QSQETLQTVTIYSFPAPNVILTKPEVSEGTEVTVKCEAHPRAKVTLNGVPAQPLGPRAQL LLKATPEDNGRSFSCSATLEVAGQLIHKNQTRELRVL corresponding to amino acids 1-393 of ICA1_HUMAN (SEQ ID NO:307), which also corresponds to amino acids 1-393 of HUMICAMA1A_PEA_{—}1_P5 (SEQ ID NO:310), and a second amino acid sequence being at least 70%, optionally at least 80%, preferably at least 85%, more preferably at least 90% and most preferably at least 95% homologous to a polypeptide having the sequence CEWGCWSMAPIPQGPISLKVP (SEQ ID NO:480) corresponding to amino acids 394-414 of HUMICAMA1A_PEA_{—}1_P5 (SEQ ID NO:310), wherein said first amino acid sequence and second amino acid sequence are contiguous and in a sequential order.

[0103] According to preferred embodiments of the present invention, there is provided an isolated polypeptide encoding for a tail of HUMICAMA1A_PEA_{—}1_P5 (SEQ ID NO:310), comprising a polypeptide being at least 70%, optionally at least about 80%, preferably at least about 85%, more preferably at least about 90% and most preferably at least about 95% homologous to the sequence CEWGCWSMAPIPQGPISLKVP (SEQ ID NO:480) in HUMICAMA1A_PEA_{—}1_P5 (SEQ ID NO:310).

[0104] According to preferred embodiments of the present invention, there is provided an isolated chimeric polypeptide encoding for HUMICAMA1A_PEA_{—}1_P8 (SEQ ID NO:311), comprising a first amino acid sequence being at least 90% homologous to MAPSSPRPALPALLVLLGALFPG corresponding to amino acids 1-23 of ICA1_HUMAN_V1 (SEQ ID NO:308), which also corresponds to amino acids 1-23 of HUMICAMA1A_PEA_L_P8 (SEQ ID NO:311), and a second amino acid sequence being at least 90% homologous to TPERVELAPLPSWQPVGKNLTLRCQVEGGAPRANLTVVLLRGEKELKREPAVGEPAEV TTTVLVRRDHHGANFSCRTELDLRPQGLELFENTSAPYQLQTFVLPATPPQLVSPRVLE VDTQGTVVCSLDGLFPVSEAQVHLALGDQRLNPTVTYGNDSFSAKASVSVTAEDEGTQ RLTCAVILGNQSQETLQTVTIYSFPAPNVILTKPEVSEGTEVTVKCEAHPRAKVTLNGVP AQPLGPRAQLLLKATPEDNGRSFSCSATLEVAGQLIHKNQTRELRVLYGPRLDERDCPG NWTWPENSQQTPMCQAWGNPLPELKCLKDGTFPLPIGESVTVTRDLEGTYLCRARSTQ GEVTRKVTVNVLSPRYEIVIITVVAAAVIMGTAGLSTYLYNRQRKIKKYRLQQAQKGTP MKPNTQATPP corresponding to amino acids 112-532 of ICA1_HUMAN_V1 (SEQ ID NO:308), which also corresponds to amino acids 24-444 of HUMICAMA1A_PEA_{—}1_P8 (SEQ ID NO:311), wherein said first amino acid sequence and second amino acid sequence are contiguous and in a sequential order.

[0105] According to preferred embodiments of the present invention, there is provided an isolated chimeric polypeptide encoding for an edge portion of HUMICAMA1A_PEA_{—}1_P8 (SEQ ID NO:311), comprising a polypeptide having a length “n”, wherein n is at least about 10 amino acids in length, optionally at least about 20 amino acids in length, preferably at least about 30 amino acids in length, more preferably at least about 40 amino acids in length and most preferably at least about 50 amino acids in length, wherein at least two amino acids comprise GT, having a structure as follows: a sequence starting from any of amino acid numbers 23−x to 23; and ending at any of amino acid numbers 24+((n−2)−x), in which x varies from 0 to n−2.

[0106] According to preferred embodiments of the present invention, there is provided an isolated chimeric polypeptide encoding for HUMICAMA1A_PEA_{—}1_P15 (SEQ ID NO:312), comprising a first amino acid sequence being at least 90% homologous to MAPSSPRPALPALLVLLGALFPGPGNAQTSVSPSKVILPRGGSVLVTCSTSCDQPKLLGIE TPLPKKELLLPGNNRKVYELSNVQEDSQPMCYSNCPDGQSTAKTFLTVYWTPERVELA PLPSWQPVGKNLTLRCQVEGGAPRANLTVVLLRGEKELKREPAVGEPAEVTTTVLVRR DHHGANFSCRTELDLRPQGLELFENTSAPYQLQTF corresponding to amino acids 1-212 of ICA1_HUMAN (SEQ ID NO:307), which also corresponds to amino acids 1-212 of HUMICAMA1A_PEA_{—}1_P15 (SEQ ID NO:312), and a second amino acid sequence being at least 70%, optionally at least 80%, preferably at least 85%, more preferably at least 90% and most preferably at least 95% homologous to a polypeptide having the sequence GED corresponding to amino acids 213-215 of HUMICAMA1A_PEA_{—}1_P15 (SEQ ID NO:312), wherein said first amino acid sequence and second amino acid sequence are contiguous and in a sequential order.

[0107] According to preferred embodiments of the present invention, there is provided an isolated chimeric polypeptide encoding for HUM4COLA_PEA_{—}1_P7 (SEQ ID NO:276), comprising a first amino acid sequence being at least 90% homologous to MSLWQPLVLVLLVLGCCFAAPRQRQSTLVLFPGDLRTNLTDRQLAEEYLYRYGYTRVA EMRGESKSLGPALLLLQKQLSLPETGELDSATLKAMRTPRCGVPDLGRFQTFEGDLKW HHHNITYWIQNYSEDLPRAVIDDAFARAFALWSAVTPLTFTRVYSRDADIVIQFGVAEH GDGYPFDGKDGLLAHAFPPGPGIQGDAHFDDDELWSLGKGVVVPTRFGNADGAACHF PFIFEGRSYSACTTDGRSDGLPWCSTTANYDTDDRFGFCPSERLYTRDGNADGKPCQFP FIFQGQSYSACTTDGRSDGYRWCATTANYDRDKLFGFCPTRADSTVMGGNSAGELCVF PFTFLGKE corresponding to amino acids 1-357 of MM09_HUMAN (SEQ ID NO:275), which also corresponds to amino acids 1-357 of HUM4COLA_PEA_{—}1_P7 (SEQ ID NO:276), and a second amino acid sequence being at least 70%, optionally at least 80%, preferably at least 85%, more preferably at least 90% and most preferably at least 95% homologous to a polypeptide having the sequence SSP (SEQ ID NO:481) corresponding to amino acids 358-360 of HUM4COLA_PEA_{—}1_P7 (SEQ ID NO:276), wherein said first amino acid sequence and second amino acid sequence are contiguous and in a sequential order.

[0108] According to preferred embodiments of the present invention, there is provided an isolated polypeptide encoding for a tail of HUM4COLA-PEA_{—}1_P7 (SEQ ID NO:276), comprising a polypeptide being at least 70%, optionally at least about 80%, preferably at least about 85%, more preferably at least about 90% and most preferably at least about 95% homologous to the sequence SSP (SEQ ID NO:481) in HUM4COLA_PEA_{—}1_P7 (SEQ ID NO:276).

[0109] According to preferred embodiments of the present invention, there is provided an isolated chimeric polypeptide encoding for HUM4COLA_PEA_{—}1_P14 (SEQ ID NO:277), comprising a first amino acid sequence being at least 90% homologous to MSLWQPLVLVLLVLGCCFAAPRQRQSTLVLFPGDLRTNLTDRQLAEEYLYRYGYTRVA EMRGESKSLGPALLLLQKQLSLPETGELDSATLKAMRTPRCGVPDLGRFQTFEGDLKW HHHNITYWIQNYSEDLPRAVIDDAFARAFALWSAVTPLTFTRVYSRDADIVIQFGVAEH GDGYPFDGKDGLLAHAFPPGPGIQGDAHFDDDELWSLGKGVVVPTRFGNADGAACHF PFIFEGRSYSACTTDGRSDGLPWCSTTANYDTDDRFGFCPSE corresponding to amino acids 1-274 of MM09_HUMAN (SEQ ID NO:275), which also corresponds to amino acids 1-274 of HUM4COLA_PEA_{—}1_P14 (SEQ ID NO:277), and a second amino acid sequence being at least 70%, optionally at least 80%, preferably at least 85%, more preferably at least 90% and most preferably at least 95% homologous to a polypeptide having the sequence SE corresponding to amino acids 275-276 of HUM4COLA_PEA_{—}1_P14 (SEQ ID NO:277), wherein said first amino acid sequence and second amino acid sequence are contiguous and in a sequential order.

[0110] According to preferred embodiments of the present invention, there is provided an isolated chimeric polypeptide encoding for HUM4COLA_PEA_{—}1_P15 (SEQ ID NO:278), comprising a first amino acid sequence being at least 90% homologous to MSLWQPLVLVLLVLGCCFAAPRQRQSTLVLFPGDLRTNLTDRQLAEEYLYRYGYTRVA EMRGESKSLGPALLLLQKQLSLPETGELDSATLKAMRTPRCGVPDLGRFQTFEGDLKW HHHNITYWIQNYSEDLPRAVIDDAFARAFALWSAVTPLTFTRVYSRDADIVIQFGVAEH GDGYPFDGKDGLLAHAFPPGPGIQGDAHFDDDELWSLGKGV corresponding to amino acids 1-216 of MM09_HUMAN (SEQ ID NO:275), which also corresponds to amino acids 1-216 of HUM4COLA_PEA_{—}1_P15 (SEQ ID NO:278), and a second amino acid sequence being at least 70%, optionally at least 80%, preferably at least 85%, more preferably at least 90% and most preferably at least 95% homologous to a polypeptide having the sequence GEILSPPGP (SEQ ID NO:482) corresponding to amino acids 217-225 of HUM4COLA_PEA_{—}1_P15 (SEQ ID NO:278), wherein said first amino acid sequence and second amino acid sequence are contiguous and in a sequential order.

[0111] According to preferred embodiments of the present invention, there is provided an isolated polypeptide encoding for a tail of HUM4COLA_PEA_{—}1_P15 (SEQ ID NO:278), comprising a polypeptide being at least 70%, optionally at least about 80%, preferably at least about 85%, more preferably at least about 90% and most preferably at least about 95% homologous to the sequence GEILSPPGP (SEQ ID NO:482) in HUM4COLA_PEA_{—}1_P15 (SEQ ID NO:278).

[0112] According to preferred embodiments of the present invention, there is provided an isolated chimeric polypeptide encoding for HSSTROMR_PEA_{—}1_P4 (SEQ ID NO:244), comprising a first amino acid sequence being at least 90% homologous to MKSLPILLLLCVAVCSAYPLDGAARGEDTSMNLV corresponding to amino acids 1-34 of MM03_HUMAN (SEQ ID NO:243), which also corresponds to amino acids 1-34 of HSSTROMR_PEA_{—}1_P4 (SEQ ID NO:244), and a second amino acid sequence being at least 90% homologous to QKFLGLEVTGKLDSDTLEVMRKPRCGVPDVGHFRTFPGIPKWRKTHLTYRIVNYTPDLP KDAVDSAVEKALKVWEEVTPLTFSRLYEGEADIMISFAVREHGDFYPFDGPGNVLAHA YAPGPGINGDAHFDDDEQWTKDTTGTNLFLVAAHEIGHSLGLFHSANTEALMYPLYHS LTDLTRFRLSQDDINGIQSLYGPPPDSPETPLVPTEPVPPEPGTPANCDPALSFDAVSTLR GEILIFKDRHFWRKSLRKLEPELHLISSFWPSLPSGVDAAYEVTSKDLVFIFKGNQFWAIR GNEVRAGYPRGIHTLGFPPTVRKIDAAISDKEKNKTYFFVEDKYWRFDEKRNSMEPGFP KQIAEDFPGIDSKIDAVFEEFGFFYFFTGSSQLEFDPNAKKVTHTLKSNSWLNC corresponding to amino acids 68-477 of MM03_HUMAN (SEQ ID NO:243), which also corresponds to amino acids 35-444 of HSSTROMR_PEA_{—}1_P4 (SEQ ID NO:244), wherein said first amino acid sequence and second amino acid sequence are contiguous and in a sequential order.

[0113] According to preferred embodiments of the present invention, there is provided an isolated chimeric polypeptide encoding for an edge portion of HSSTROMR_PEA_{—}1_P4 (SEQ ID NO:244), comprising a polypeptide having a length “n”, wherein n is at least about 10 amino acids in length, optionally at least about 20 amino acids in length, preferably at least about 30 amino acids in length, more preferably at least about 40 amino acids in length and most preferably at least about 50 amino acids in length, wherein at least two amino acids comprise VQ, having a structure as follows: a sequence starting from any of amino acid numbers 34−x to 34; and ending at any of amino acid numbers 35+((n−2)−x), in which x varies from 0 to n−2.

[0114] According to preferred embodiments of the present invention, there is provided an isolated chimeric polypeptide encoding for HSIGFACI_PEA_{—}1_P5 (SEQ ID NO:225), comprising a first amino acid sequence being at least 70%, optionally at least 80%, preferably at least 85%, more preferably at least 90% and most preferably at least 95% homologous to a polypeptide having the sequence MITPTVK (SEQ ID NO:483) corresponding to amino acids 1-7 of HSIGFACI_PEA_{—}1_P5 (SEQ ID NO:225), a second amino acid sequence being at least 90% homologous to MHTMSSSHLFYLALCLLTFTSSATAGPETLCGAELVDALQFVCGDRGFYFNKPTGYGSS SRRAPQTGIVDECCFRSCDLRRLEMYCAPLKPAKSARSVRAQRHTDMPKTQK corresponding to amino acids 1-111 of Q9NP10 (SEQ ID NO:222), which also corresponds to amino acids 8-118 of HSIGFACI_PEA_{—}1_P5 (SEQ ID NO:225), and a third amino acid sequence being at least 70%, optionally at least 80%, preferably at least 85%, more preferably at least 90% and most preferably at least 95% homologous to a polypeptide having the sequence YQPPSTNKNTKSQRRKGSTFEERK (SEQ ID NO:484) corresponding to amino acids 119-142 of HSIGFACI_PEA_{—}1_P5 (SEQ ID NO:225), wherein said first amino acid sequence, second amino acid sequence and third amino acid sequence are contiguous and in a sequential order.

[0115] According to preferred embodiments of the present invention, there is provided an isolated polypeptide encoding for a head of HSIGFACI_PEA_{—}1_P5 (SEQ ID NO:225), comprising a polypeptide being at least 70%, optionally at least about 80%, preferably at least about 85%, more preferably at least about 90% and most preferably at least about 95% homologous to the sequence MITPTVK (SEQ ID NO:483) of HSIGFACI_PEA_{—}1_P5 (SEQ ID NO:225).

[0116] According to preferred embodiments of the present invention, there is provided an isolated polypeptide encoding for a tail of HSIGFACI_PEA_{—}1_P5 (SEQ ID NO:225), comprising a polypeptide being at least 70%, optionally at least about 80%, preferably at least about 85%, more preferably at least about 90% and most preferably at least about 95% homologous to the sequence YQPPSTNKNTKSQRRKGSTFEERK (SEQ ID NO:484) in HSIGFACI_PEA_{—}1_P5 (SEQ ID NO:225).

[0117] According to preferred embodiments of the present invention, there is provided an isolated chimeric polypeptide encoding for HSIGFACI_PEA_{—}1_P5 (SEQ ID NO:225), comprising a first amino acid sequence being at least 70%, optionally at least 80%, preferably at least 85%, more preferably at least 90% and most preferably at least 95% homologous to a polypeptide having the sequence MITPT (SEQ ID NO:485) corresponding to amino acids 1-5 of HSIGFACI_PEA_{—}1_P5 (SEQ ID NO:225), and a second amino acid sequence being at least 90% homologous to VKMHTMSSSHLFYLALCLLTFTS SATAGPETLCGAELVDALQFVCGDRGFYFNKPTGY GSSSRRAPQTGIVDECCFRSCDLRRLEMYCAPLKPAKSARSVRAQRHTDMPKTQKYQP PSTNKNTKSQRRKGSTFEERK corresponding to amino acids 3-139 of Q13429 (SEQ ID NO:224), which also corresponds to amino acids 6-142 of HSIGFACI_PEA_{—}1_P5 (SEQ ID NO:225), wherein said first amino acid sequence and second amino acid sequence are contiguous and in a sequential order.

[0118] According to preferred embodiments of the present invention, there is provided an isolated polypeptide encoding for a head of HSIGFACI_PEA_{—}1_P5 (SEQ ID NO:225), comprising a polypeptide being at least 70%, optionally at least about 80%, preferably at least about 85%, more preferably at least about 90% and most preferably at least about 95% homologous to the sequence MITPT (SEQ ID NO:485) of HSIGFACI_PEA_{—}1_P5 (SEQ ID NO:225).

[0119] According to preferred embodiments of the present invention, there is provided an isolated chimeric polypeptide encoding for HSIGFACI_PEA_{—}1_P5 (SEQ ID NO:225), comprising a first amino acid sequence being at least 70%, optionally at least 80%, preferably at least 85%, more preferably at least 90% and most preferably at least 95% homologous to a polypeptide having the sequence MITPT (SEQ ID NO:485) corresponding to amino acids 1-5 of HSIGFACI_PEA_{—}1_P5 (SEQ ID NO:225), a second amino acid sequence being at least 90% homologous to VKMHTMSSSHLFYLALCLLTFTSSATAGPETLCGAELVDALQFVCGDRGFYFNKPTGY GSSSRRAPQTGIVDECCFRSCDLRRLEMYCAPLKPAKSARSVRAQRHTDMPKTQKYQP PSTNKNTKSQRRKG corresponding to amino acids 22-151 of IGFB_HUMAN (SEQ ID NO:220), which also corresponds to amino acids 6-135 of HSIGFACI_PEA_{—}1_P5 (SEQ ID NO:225), and a third amino acid sequence being at least 70%, optionally at least 80%, preferably at least 85%, more preferably at least 90% and most preferably at least 95% homologous to a polypeptide having the sequence STFEERK corresponding to amino acids 136-142 of HSIGFACI_PEA_{—}1_P5 (SEQ ID NO:225), wherein said first amino acid sequence, second amino acid sequence and third amino acid sequence are contiguous and in a sequential order.

[0120] According to preferred embodiments of the present invention, there is provided an isolated polypeptide encoding for a head of HSIGFACI_PEA_{—}1_P5 (SEQ ID NO:225), comprising a polypeptide being at least 70%, optionally at least about 80%, preferably at least about 85%, more preferably at least about 90% and most preferably at least about 95% homologous to the sequence MITPT (SEQ ID NO:485) of HSIGFACI_PEA_{—}1_P5 (SEQ ID NO:225).

[0121] According to preferred embodiments of the present invention, there is provided an isolated polypeptide encoding for a tail of HSIGFACI_PEA_{—}1_P5 (SEQ ID NO:225), comprising a polypeptide being at least 70%, optionally at least about 80%, preferably at least about 85%, more preferably at least about 90% and most preferably at least about 95% homologous to the sequence STFEERK in HSIGFACI_PEA_{—}1_P5 (SEQ ID NO:225).

[0122] According to preferred embodiments of the present invention, there is provided an isolated chimeric polypeptide encoding for HSIGFACI_PEA_{—}1_P5 (SEQ ID NO:225), comprising a first amino acid sequence being at least 90% homologous to MITPTVKMHTMSSSHLFYLALCLLTFTSSATAGPETLCGAELVDALQFVCGDRGFYFNK PTGYGSSSRRAPQTGIVDECCFRSCDLRRLEMYCAPLKPAKSARSVRAQRHTDMPKTQ K corresponding to amino acids 1-118 of Q14620 (SEQ ID NO:221), which also corresponds to amino acids 1-118 of HSIGFACI_PEA_{—}1_P5 (SEQ ID NO:225), and a second amino acid sequence being at least 70%, optionally at least 80%, preferably at least 85%, more preferably at least 90% and most preferably at least 95% homologous to a polypeptide having the sequence YQPPSTNKNTKSQRRKGSTFEERK (SEQ ID NO:484) corresponding to amino acids 119-142 of HSIGFACI_PEA_{—}1_P5 (SEQ ID NO:225), wherein said first amino acid sequence and second amino acid sequence are contiguous and in a sequential order.

[0123] According to preferred embodiments of the present invention, there is provided an isolated polypeptide encoding for a tail of HSIGFACI_PEA_{—}1_P5 (SEQ ID NO:225), comprising a polypeptide being at least 70%, optionally at least about 80%, preferably at least about 85%, more preferably at least about 90% and most preferably at least about 95% homologous to the sequence YQPPSTNKNTKSQRRKGSTFEERK (SEQ ID NO:484) in HSIGFACI_PEA_{—}1_P5 (SEQ ID NO:225).

[0124] According to preferred embodiments of the present invention, there is provided an isolated chimeric polypeptide encoding for HSIGFACI_PEA_{—}1_P5 (SEQ ID NO:225), comprising a first amino acid sequence being at least 70%, optionally at least 80%, preferably at least 85%, more preferably at least 90% and most preferably at least 95% homologous to a polypeptide having the sequence MITPT (SEQ ID NO:485) corresponding to amino acids 1-5 of HSIGFACI_PEA_{—}1_P5 (SEQ ID NO:225), a second amino acid sequence being at least 90% homologous to VKMHTMSSSHLFYLALCLLTFTSSATAGPETLCGAELVDALQFVCGDRGFYFNKPTGY GSSSRRAPQTGIVDECCFRSCDLRRLEMYCAPLKPAKSARSVRAQRHTDMPKTQK corresponding to amino acids 22-134 of IGFA_HUMAN (SEQ ID NO:223), which also corresponds to amino acids 6-118 of HSIGFACI_PEA_{—}1_P5 (SEQ ID NO:225), and a third amino acid sequence being at least 70%, optionally at least 80%, preferably at least 85%, more preferably at least 90% and most preferably at least 95% homologous to a polypeptide having the sequence YQPPSTNKNTKSQRRKGSTFEERK (SEQ ID NO:484) corresponding to amino acids 119-142 of HSIGFACI_PEA_{—}1_P5 (SEQ ID NO:225), wherein said first amino acid sequence, second amino acid sequence and third amino acid sequence are contiguous and in a sequential order.

[0125] According to preferred embodiments of the present invention, there is provided an isolated polypeptide encoding for a head of HSIGFACI_PEA_{—}1_P5 (SEQ ID NO:225), comprising a polypeptide being at least 70%, optionally at least about 80%, preferably at least about 85%, more preferably at least about 90% and most preferably at least about 95% homologous to the sequence MITPT (SEQ ID NO:485) of HSIGFACI_PEA_{—}1_P5 (SEQ ID NO:225).

[0126] According to preferred embodiments of the present invention, there is provided an isolated polypeptide encoding for a tail of HSIGFACI_PEA_{—}1_P5 (SEQ ID NO:225), comprising a polypeptide being at least 70%, optionally at least about 80%, preferably at least about 85%, more preferably at least about 90% and most preferably at least about 95% homologous to the sequence YQPPSTNKNTKSQRRKGSTFEERK (SEQ ID NO:484) in HSIGFACI_PEA_{—}1_P5 (SEQ ID NO:225).

[0127] According to preferred embodiments of the present invention, there is provided an isolated chimeric polypeptide encoding for HSIGFACI_PEA_{—}1_P2 (SEQ ID NO:226), comprising a first amino acid sequence being at least 70%, optionally at least 80%, preferably at least 85%, more preferably at least 90% and most preferably at least 95% homologous to a polypeptide having the sequence MITPT (SEQ ID NO:485) corresponding to amino acids 1-5 of HSIGFACI_PEA_{—}1_P2 (SEQ ID NO:226), and a second amino acid sequence being at least 90% homologous to VKMHTMSSSHLFYLALCLLTFTSSATAGPETLCGAELVDALQFVCGDRGFYFNKPTGY GSSSRRAPQTGIVDECCFRSCDLRRLEMYCAPLKPAKSARSVRAQRHTDMPKTQKEVH LKNASRGSAGNKNYRM (SEQ ID NO:487) corresponding to amino acids 22-153 of IGFA_HUMAN (SEQ ID NO:223), which also corresponds to amino acids 6-137 of HSIGFACI_PEA_{—}1_P2 (SEQ ID NO:226), wherein said first amino acid sequence and second amino acid sequence are contiguous and in a sequential order.

[0128] According to preferred embodiments of the present invention, there is provided an isolated polypeptide encoding for a head of HSIGFACI_PEA_{—}1_P2 (SEQ ID NO:226), comprising a polypeptide being at least 70%, optionally at least about 80%, preferably at least about 85%, more preferably at least about 90% and most preferably at least about 95% homologous to the sequence MITPT (SEQ ID NO:485) of HSIGFACI_PEA_{—}1_P2 (SEQ ID NO:226).

[0129] According to preferred embodiments of the present invention, there is provided an isolated chimeric polypeptide encoding for HSIGFACI_PEA_{—}1_P6 (SEQ ID NO: 227), comprising a first amino acid sequence being at least 90% homologous to MGKISSLPTQLFKCCFCDFLKVKMHTMSSSHLFYLALCLLTFTSSATAGPETLCGAELV DALQFVCGDRGFYFNKPTGYGSSSRRAPQTGIVDECCFRSCDLRRLEMYCAPLKPAKS ARSVRAQRHTDMPKTQK corresponding to amino acids 1-134 of IGFA_HUMAN (SEQ ID NO:223), which also corresponds to amino acids 1-134 of HSIGFACI_PEA_{—}1_P6 (SEQ ID NO: 227), and a second amino acid sequence being at least 70%, optionally at least 80%, preferably at least 85%, more preferably at least 90% and most preferably at least 95% homologous to a polypeptide having the sequence YQPPSTNKNTKSQRRKGWPKTHPGGEQKEGTEASLQIRGKKKEQRREIGSRNAECRGK KGK (SEQ ID NO:486) corresponding to amino acids 135-195 of HSIGFACI_PEA_{—}1_P6 (SEQ ID NO: 227), wherein said first amino acid sequence and second amino acid sequence are contiguous and in a sequential order.

[0130] According to preferred embodiments of the present invention, there is provided an isolated polypeptide encoding for a tail of HSIGFACI_PEA_{—}1_P6 (SEQ ID NO: 227), comprising a polypeptide being at least 70%, optionally at least about 80%, preferably at least about 85%, more preferably at least about 90% and most preferably at least about 95% homologous to the sequence YQPPSTNKNTKSQRRKGWPKTHPGGEQKEGTEASLQIRGKKKEQRREIGSRNAECRGK KGK (SEQ ID NO:486) in HSIGFACI_PEA_{—}1_P6 (SEQ ID NO: 227).

[0131] According to preferred embodiments of the present invention, there is provided an isolated chimeric polypeptide encoding for HSIGFACI_PEA_{—}1_P1 (SEQ ID NO:228), comprising a first amino acid sequence being at least 90% homologous to MGKISSLPTQLFKCCFCDFLKVKMHTMSSSHLFYLALCLLTFTSSATAGPETLCGAELV DALQFVCGDRGFYFNKPTGYGSSSRRAPQTGIVDECCFRSCDLRRLEMYCAPLKPAKS ARSVRAQRHTDMPKTQK corresponding to amino acids 1-134 of IGFB_HUMAN (SEQ ID NO:220), which also corresponds to amino acids 1-134 of HSIGFACI_PEA_{—}1_P1 (SEQ ID NO:228), and a second amino acid sequence being at least 70%, optionally at least 80%, preferably at least 85%, more preferably at least 90% and most preferably at least 95% homologous to a polypeptide having the sequence EVHLKNASRGSAGNKNYRM (SEQ ID NO:487) corresponding to amino acids 135-153 of HSIGFACI_PEA_{—}1_P1 (SEQ ID NO:228), wherein said first amino acid sequence and second amino acid sequence are contiguous and in a sequential order.

[0132] According to preferred embodiments of the present invention, there is provided an isolated polypeptide encoding for a tail of HSIGFACI_PEA_{—}1_P1 (SEQ ID NO:228), comprising a polypeptide being at least 70%, optionally at least about 80%, preferably at least about 85%, more preferably at least about 90% and most preferably at least about 95% homologous to the sequence EVHLKNASRGSAGNKNYRM (SEQ ID NO:487) in HSIGFACI_PEA_{—}1_P1 (SEQ ID NO:228).

[0133] According to preferred embodiments of the present invention, there is provided an isolated chimeric polypeptide encoding for HSIGFACI_PEA_{—}1_P7 (SEQ ID NO:229), comprising a first amino acid sequence being at least 90% homologous to MGKISSLPTQLFKCCFCDFLKVKMHTMSSSHLFYLALCLLTFTSSATAGPETLCGAELV DALQFVCGDRGFYF corresponding to amino acids 1-73 of IGFB_HUMAN (SEQ ID NO:220), which also corresponds to amino acids 1-73 of HSIGFACI_PEA_{—}1_P7 (SEQ ID NO:229), and a second amino acid sequence being at least 70%, optionally at least 80%, preferably at least 85%, more preferably at least 90% and most preferably at least 95% homologous to a polypeptide having the sequence SRKILLKLRSSVARCSGSLLKFQQFERPRQENCLS (SEQ ID NO:488) corresponding to amino acids 74-108 of HSIGFACI_PEA_{—}1_P7 (SEQ ID NO:229), wherein said first amino acid sequence and second amino acid sequence are contiguous and in a sequential order.

[0134] According to preferred embodiments of the present invention, there is provided an isolated polypeptide encoding for a tail of HSIGFACI_PEA_{—}1_P7 (SEQ ID NO:229), comprising a polypeptide being at least 70%, optionally at least about 80%, preferably at least about 85%, more preferably at least about 90% and most preferably at least about 95% homologous to the sequence SRKILLKLRSSVARCSGSLLKFQQFERPRQENCLS (SEQ ID NO:488) in HSIGFACI_PEA_{—}1_P7 (SEQ ID NO:229).

[0135] According to preferred embodiments of the present invention, there is provided an isolated chimeric polypeptide encoding for HSIGFACI_PEA_{—}1_P7 (SEQ ID NO:229), comprising a first amino acid sequence being at least 90% homologous to MGKISSLPTQLFKCCFCDFLKVKMHTMSSSHLFYLALCLLTFTS SATAGPETLCGAELV DALQFVCGDRGFYF corresponding to amino acids 1-73 of IGFA_HUMAN (SEQ ID NO:223), which also corresponds to amino acids 1-73 of HSIGFACI_PEA_{—}1_P7 (SEQ ID NO:229), and a second amino acid sequence being at least 70%, optionally at least 80%, preferably at least 85%, more preferably at least 90% and most preferably at least 95% homologous to a polypeptide having the sequence SRKILLKLRSSVARCSGSLLKFQQFERPRQENCLS (SEQ ID NO:488) corresponding to amino acids 74-108 of HSIGFACI_PEA_{—}1_P7 (SEQ ID NO:229), wherein said first amino acid sequence and second amino acid sequence are contiguous and in a sequential order.

[0136] According to preferred embodiments of the present invention, there is provided an isolated polypeptide encoding for a tail of HSIGFACI_PEA_{—}1_P7 (SEQ ID NO:229), comprising a polypeptide being at least 70%, optionally at least about 80%, preferably at least about 85%, more preferably at least about 90% and most preferably at least about 95% homologous to the sequence SRKILLKLRSSVARCSGSLLKFQQFERPRQENCLS (SEQ ID NO:488) in HSIGFACI_PEA_{—}1_P7 (SEQ ID NO:229).

[0137] According to preferred embodiments of the present invention, there is provided an isolated chimeric polypeptide encoding for HSIGFACI_PEA_{—}1_P8 (SEQ ID NO:230), comprising a first amino acid sequence being at least 70%, optionally at least 80%, preferably at least 85%, more preferably at least 90% and most preferably at least 95% homologous to a polypeptide having the sequence MITPTVK (SEQ ID NO:483) corresponding to amino acids 1-7 of HSIGFACI_PEA_{—}1_P8 (SEQ ID NO:230), a second amino acid sequence being at least 90% homologous to MHTMSSSHLFYLALCLLTFTSSATAGPETLCGAELVDALQFVCGDRGFYF corresponding to amino acids 1-50 of Q9NP10 (SEQ ID NO:222), which also corresponds to amino acids 8-57 of HSIGFACI_PEA_{—}1_P8 (SEQ ID NO:230), and a third amino acid sequence being at least 70%, optionally at least 80%, preferably at least 85%, more preferably at least 90% and most preferably at least 95% homologous to a polypeptide having the sequence SRKILLKLRSSVARCSGSLLKFQQFERPRQENCLS (SEQ ID NO:488) corresponding to amino acids 58-92 of HSIGFACI_PEA_{—}1_P8 (SEQ ID NO:230), wherein said first amino acid sequence, second amino acid sequence and third amino acid sequence are contiguous and in a sequential order.

[0138] According to preferred embodiments of the present invention, there is provided an isolated polypeptide encoding for a head of HSIGFACI_PEA_{—}1_P8 (SEQ ID NO:230), comprising a polypeptide being at least 70%, optionally at least about 80%, preferably at least about 85%, more preferably at least about 90% and most preferably at least about 95% homologous to the sequence MITPTVK (SEQ ID NO:483) of HSIGFACI_PEA_{—}1_P8 (SEQ ID NO:230).

[0139] According to preferred embodiments of the present invention, there is provided an isolated polypeptide encoding for a tail of HSIGFACI_PEA_{—}1_P8 (SEQ ID NO:230), comprising a polypeptide being at least 70%, optionally at least about 80%, preferably at least about 85%, more preferably at least about 90% and most preferably at least about 95% homologous to the sequence SRKILLKLRSSVARCSGSLLKFQQFERPRQENCLS (SEQ ID NO:488) in HSIGFACI_PEA_{—}1_P8 (SEQ ID NO:230).

[0140] According to preferred embodiments of the present invention, there is provided an isolated chimeric polypeptide encoding for HSIGFACI_PEA_{—}1_P8 (SEQ ID NO:230), comprising a first amino acid sequence being at least 70%, optionally at least 80%, preferably at least 85%, more preferably at least 90% and most preferably at least 95% homologous to a polypeptide having the sequence MITPT (SEQ ID NO:485) corresponding to amino acids 1-5 of HSIGFACI_PEA_{—}1_P8 (SEQ ID NO:230), a second amino acid sequence being at least 90% homologous to VKMHTMSSSHLFYLALCLLTFTSSATAGPETLCGAELVDALQFVCGDRGFYF corresponding to amino acids 3-54 of Q13429 (SEQ ID NO:224), which also corresponds to amino acids 6-57 of HSIGFACI_PEA_{—}1_P8 (SEQ ID NO:230), and a third amino acid sequence being at least 70%, optionally at least 80%, preferably at least 85%, more preferably at least 90% and most preferably at least 95% homologous to a polypeptide having the sequence SRKILLKLRSSVARCSGSLLKFQQFERPRQENCLS (SEQ ID NO:488) corresponding to amino acids 58-92 of HSIGFACI_PEA_{—}1_P8 (SEQ ID NO:230), wherein said first amino acid sequence, second amino acid sequence and third amino acid sequence are contiguous and in a sequential order.

[0141] According to preferred embodiments of the present invention, there is provided an isolated polypeptide encoding for a head of HSIGFACI_PEA_{—}1_P8 (SEQ ID NO:230), comprising a polypeptide being at least 70%, optionally at least about 80%, preferably at least about 85%, more preferably at least about 90% and most preferably at least about 95% homologous to the sequence MITPT (SEQ ID NO:485) of HSIGFACI_PEA_{—}1_P8 (SEQ ID NO:230).

[0142] According to preferred embodiments of the present invention, there is provided an isolated polypeptide encoding for a tail of HSIGFACI_PEA_{—}1_P8 (SEQ ID NO:230), comprising a polypeptide being at least 70%, optionally at least about 80%, preferably at least about 85%, more preferably at least about 90% and most preferably at least about 95% homologous to the sequence SRKILLKLRSSVARCSGSLLKFQQFERPRQENCLS (SEQ ID NO:488) in HSIGFACI_PEA_{—}1_P8 (SEQ ID NO:230).

[0143] According to preferred embodiments of the present invention, there is provided an isolated chimeric polypeptide encoding for HSIGFACI_PEA_{—}1_P8 (SEQ ID NO:230), comprising a first amino acid sequence being at least 90% homologous to MITPTVKMHTMSSSHLFYLALCLLTFTSSATAGPETLCGAELVDALQFVCGDRGFYF corresponding to amino acids 1-57 of Q14620 (SEQ ID NO:221), which also corresponds to amino acids 1-57 of HSIGFACI_PEA_{—}1_P8 (SEQ ID NO:230), and a second amino acid sequence being at least 70%, optionally at least 80%, preferably at least 85%, more preferably at least 90% and most preferably at least 95% homologous to a polypeptide having the sequence SRKILLKLRSSVARCSGSLLKFQQFERPRQENCLS (SEQ ID NO:488) corresponding to amino acids 58-92 of HSIGFACI_PEA_{—}1_P8 (SEQ ID NO:230), wherein said first amino acid sequence and second amino acid sequence are contiguous and in a sequential order.

[0144] According to preferred embodiments of the present invention, there is provided an isolated polypeptide encoding for a tail of HSIGFACI_PEA_{—}1_P8 (SEQ ID NO:230), comprising a polypeptide being at least 70%, optionally at least about 80%, preferably at least about 85%, more preferably at least about 90% and most preferably at least about 95% homologous to the sequence SRKILLKLRSSVARCSGSLLKFQQFERPRQENCLS (SEQ ID NO:488) in HSIGFACI_PEA_{—}1_P8 (SEQ ID NO:230).

[0145] According to preferred embodiments of the present invention, there is provided an isolated chimeric polypeptide encoding for HSIGFACI_PEA_{—}1_P8 (SEQ ID NO:230), comprising a first amino acid sequence being at least 70%, optionally at least 80%, preferably at least 85%, more preferably at least 90% and most preferably at least 95% homologous to a polypeptide having the sequence MITPT (SEQ ID NO:485) corresponding to amino acids 1-5 of HSIGFACI_PEA_{—}1_P8 (SEQ ID NO:230), a second amino acid sequence being at least 90% homologous to VKMHTMSSSHLFYLALCLLTFTSSATAGPETLCGAELVDALQFVCGDRGFYF corresponding to amino acids 22-73 of IGFB_HUMAN (SEQ ID NO:220), which also corresponds to amino acids 6-57 of HSIGFACI_PEA_{—}1_P8 (SEQ ID NO:230), and a third amino acid sequence being at least 70%, optionally at least 80%, preferably at least 85%, more preferably at least 90% and most preferably at least 95% homologous to a polypeptide having the sequence SRKILLKLRSSVARCSGSLLKFQQFERPRQENCLS (SEQ ID NO:488) corresponding to amino acids 58-92 of HSIGFACI_PEA_{—}1_P8 (SEQ ID NO:230), wherein said first amino acid sequence, second amino acid sequence and third amino acid sequence are contiguous and in a sequential order.

[0146] According to preferred embodiments of the present invention, there is provided an isolated polypeptide encoding for a head of HSIGFACI_PEA_{—}1_P8 (SEQ ID NO:230), comprising a polypeptide being at least 70%, optionally at least about 80%, preferably at least about 85%, more preferably at least about 90% and most preferably at least about 95% homologous to the sequence MITPT (SEQ ID NO:485) of HSIGFACI_PEA_{—}1_P8 (SEQ ID NO:230).

[0147] According to preferred embodiments of the present invention, there is provided an isolated polypeptide encoding for a tail of HSIGFACI_PEA_{—}1_P8 (SEQ ID NO:230), comprising a polypeptide being at least 70%, optionally at least about 80%, preferably at least about 85%, more preferably at least about 90% and most preferably at least about 95% homologous to the sequence SRKILLKLRSSVARCSGSLLKFQQFERPRQENCLS (SEQ ID NO:488) in HSIGFACI_PEA_{—}1_P8 (SEQ ID NO:230).

[0148] According to preferred embodiments of the present invention, there is provided an isolated chimeric polypeptide encoding for HSIGFACI_PEA_{—}1_P8 (SEQ ID NO:230), comprising a first amino acid sequence being at least 70%, optionally at least 80%, preferably at least 85%, more preferably at least 90% and most preferably at least 95% homologous to a polypeptide having the sequence MITPT (SEQ ID NO:485) corresponding to amino acids 1-5 of HSIGFACI_PEA_{—}1_P8 (SEQ ID NO:230), a second amino acid sequence being at least 90% homologous to VKMHTMSSSHLFYLALCLLTFTSSATAGPETLCGAELVDALQFVCGDRGFYF corresponding to amino acids 22-73 of IGFA_HUMAN (SEQ ID NO:223), which also corresponds to amino acids 6-57 of HSIGFACI_PEA_{—}1_P8 (SEQ ID NO:230), and a third amino acid sequence being at least 70%, optionally at least 80%, preferably at least 85%, more preferably at least 90% and most preferably at least 95% homologous to a polypeptide having the sequence SRKILLKLRSSVARCSGSLLKFQQFERPRQENCLS (SEQ ID NO:488) corresponding to amino acids 58-92 of HSIGFACI_PEA_{—}1_P8 (SEQ ID NO:230), wherein said first amino acid sequence, second amino acid sequence and third amino acid sequence are contiguous and in a sequential order.

[0149] According to preferred embodiments of the present invention, there is provided an isolated polypeptide encoding for a head of HSIGFACI_PEA_{—}1_P8 (SEQ ID NO:230), comprising a polypeptide being at least 70%, optionally at least about 80%, preferably at least about 85%, more preferably at least about 90% and most preferably at least about 95% homologous to the sequence MITPT (SEQ ID NO:485) of HSIGFACI_PEA_{—}1_P8 (SEQ ID NO:230).

[0150] According to preferred embodiments of the present invention, there is provided an isolated polypeptide encoding for a tail of HSIGFACI_PEA_{—}1_P8 (SEQ ID NO:230), comprising a polypeptide being at least 70%, optionally at least about 80%, preferably at least about 85%, more preferably at least about 90% and most preferably at least about 95% homologous to the sequence SRKILLKLRSSVARCSGSLLKFQQFERPRQENCLS (SEQ ID NO:488) in HSIGFACI_PEA_{—}1_P8 (SEQ ID NO:230).

[0151] According to preferred embodiments of the present invention, there is provided an isolated chimeric polypeptide encoding for HSIGFACI_PEA_{—}1_P8 (SEQ ID NO:230), comprising a first amino acid sequence being at least 70%, optionally at least 80%, preferably at least 85%, more preferably at least 90% and most preferably at least 95% homologous to a polypeptide having the sequence MITPT (SEQ ID NO:485) corresponding to amino acids 1-5 of HSIGFACI_PEA_{—}1_P8 (SEQ ID NO:230), a second amino acid sequence being at least 90% homologous to VKMHTMSSSHLFYLALCLLTFTSSATAGPETLCGAELVDALQFVCGDRGFYF corresponding to amino acids 3-54 of Q13429 (SEQ ID NO:224), which also corresponds to amino acids 6-57 of HSIGFACI_PEA_{—}1_P8 (SEQ ID NO:230), and a third amino acid sequence being at least 70%, optionally at least 80%, preferably at least 85%, more preferably at least 90% and most preferably at least 95% homologous to a polypeptide having the sequence SRKILLKLRSSVARCSGSLLKFQQFERPRQENCLS (SEQ ID NO:488) corresponding to amino acids 58-92 of HSIGFACI_PEA_{—}1_P8 (SEQ ID NO:230), wherein said first amino acid sequence, second amino acid sequence and third amino acid sequence are contiguous and in a sequential order.

[0152] According to preferred embodiments of the present invention, there is provided an isolated polypeptide encoding for a head of HSIGFACI_PEA_{—}1_P8 (SEQ ID NO:230), comprising a polypeptide being at least 70%, optionally at least about 80%, preferably at least about 85%, more preferably at least about 90% and most preferably at least about 95% homologous to the sequence MITPT (SEQ ID NO:485) of HSIGFACI_PEA_{—}1_P8 (SEQ ID NO:230).

[0153] According to preferred embodiments of the present invention, there is provided an isolated polypeptide encoding for a tail of HSIGFACI_PEA_{—}1_P8 (SEQ ID NO:230), comprising a polypeptide being at least 70%, optionally at least about 80%, preferably at least about 85%, more preferably at least about 90% and most preferably at least about 95% homologous to the sequence SRKILLKLRSSVARCSGSLLKFQQFERPRQENCLS (SEQ ID NO:488) in HSIGFACI_PEA_{—}1_P8 (SEQ ID NO:230).

[0154] According to preferred embodiments of the present invention, there is provided an isolated chimeric polypeptide encoding for HSIGFACI_PEA_{—}1_P8 (SEQ ID NO:230), comprising a first amino acid sequence being at least 90% homologous to MITPTVKMHTMSSSHLFYLALCLLTFTSSATAGPETLCGAELVDALQFVCGDRGFYF corresponding to amino acids 1-57 of Q14620 (SEQ ID NO:221), which also corresponds to amino acids 1-57 of HSIGFACI_PEA_{—}1_P8 (SEQ ID NO:230), and a second amino acid sequence being at least 70%, optionally at least 80%, preferably at least 85%, more preferably at least 90% and most preferably at least 95% homologous to a polypeptide having the sequence SRKILLKLRSSVARCSGSLLKFQQFERPRQENCLS (SEQ ID NO:488) corresponding to amino acids 58-92 of HSIGFACI_PEA_{—}1_P8 (SEQ ID NO:230), wherein said first amino acid sequence and second amino acid sequence are contiguous and in a sequential order.

[0155] According to preferred embodiments of the present invention, there is provided an isolated polypeptide encoding for a tail of HSIGFACI_PEA_{—}1_P8 (SEQ ID NO:230), comprising a polypeptide being at least 70%, optionally at least about 80%, preferably at least about 85%, more preferably at least about 90% and most preferably at least about 95% homologous to the sequence SRKILLKLRSSVARCSGSLLKFQQFERPRQENCLS (SEQ ID NO:488) in HSIGFACI_PEA_{—}1_P8 (SEQ ID NO:230).

[0156] According to preferred embodiments of the present invention, there is provided an isolated chimeric polypeptide encoding for HSIGFACI_PEA_{—}1_P8 (SEQ ID NO:230), comprising a first amino acid sequence being at least 70%, optionally at least 80%, preferably at least 85%, more preferably at least 90% and most preferably at least 95% homologous to a polypeptide having the sequence MITPT (SEQ ID NO:485) corresponding to amino acids 1-5 of HSIGFACI_PEA_{—}1_P8 (SEQ ID NO:230), a second amino acid sequence being at least 90% homologous to VKMHTMSSSHLFYLALCLLTFTSSATAGPETLCGAELVDALQFVCGDRGFYF corresponding to amino acids 22-73 of IGFB_HUMAN (SEQ ID NO:220), which also corresponds to amino acids 6-57 of HSIGFACI_PEA_{—}1_P8 (SEQ ID NO:230), and a third amino acid sequence being at least 70%, optionally at least 80%, preferably at least 85%, more preferably at least 90% and most preferably at least 95% homologous to a polypeptide having the sequence SRKILLKLRSSVARCSGSLLKFQQFERPRQENCLS (SEQ ID NO:488) corresponding to amino acids 58-92 of HSIGFACI_PEA_{—}1_P8 (SEQ ID NO:230), wherein said first amino acid sequence, second amino acid sequence and third amino acid sequence are contiguous and in a sequential order.

[0157] According to preferred embodiments of the present invention, there is provided an isolated polypeptide encoding for a head of HSIGFACI_PEA_{—}1_P8 (SEQ ID NO:230), comprising a polypeptide being at least 70%, optionally at least about 80%, preferably at least about 85%, more preferably at least about 90% and most preferably at least about 95% homologous to the sequence MITPT (SEQ ID NO:485) of HSIGFACI_PEA_{—}1_P8 (SEQ ID NO:230).

[0158] According to preferred embodiments of the present invention, there is provided an isolated polypeptide encoding for a tail of HSIGFACI_PEA_{—}1_P8 (SEQ ID NO:230), comprising a polypeptide being at least 70%, optionally at least about 80%, preferably at least about 85%, more preferably at least about 90% and most preferably at least about 95% homologous to the sequence SRKILLKLRSSVARCSGSLLKFQQFERPRQENCLS (SEQ ID NO:488) in HSIGFACI_PEA_{—}1_P8 (SEQ ID NO:230).

[0159] According to preferred embodiments of the present invention, there is provided an isolated chimeric polypeptide encoding for HSIGFACI_PEA_{—}1_P8 (SEQ ID NO:230), comprising a first amino acid sequence being at least 70%, optionally at least 80%, preferably at least 85%, more preferably at least 90% and most preferably at least 95% homologous to a polypeptide having the sequence MITPT (SEQ ID NO:485) corresponding to amino acids 1-5 of HSIGFACI_PEA_{—}1_P8 (SEQ ID NO:230), a second amino acid sequence being at least 90% homologous to VKMHTMSSSHLFYLALCLLTFTSSATAGPETLCGAELVDALQFVCGDRGFYF corresponding to amino acids 22-73 of IGFA_HUMAN (SEQ ID NO:223), which also corresponds to amino acids 6-57 of HSIGFACI_PEA_{—}1_P8 (SEQ ID NO:230), and a third amino acid sequence being at least 70%, optionally at least 80%, preferably at least 85%, more preferably at least 90% and most preferably at least 95% homologous to a polypeptide having the sequence SRKILLKLRSSVARCSGSLLKFQQFERPRQENCLS (SEQ ID NO:488) corresponding to amino acids 58-92 of HSIGFACI_PEA_{—}1_P8 (SEQ ID NO:230), wherein said first amino acid sequence, second amino acid sequence and third amino acid sequence are contiguous and in a sequential order.

[0160] According to preferred embodiments of the present invention, there is provided an isolated polypeptide encoding for a head of HSIGFACI_PEA_{—}1_P8 (SEQ ID NO:230), comprising a polypeptide being at least 70%, optionally at least about 80%, preferably at least about 85%, more preferably at least about 90% and most preferably at least about 95% homologous to the sequence MITPT (SEQ ID NO:485) of HSIGFACI_PEA_{—}1_P8 (SEQ ID NO:230).

[0161] According to preferred embodiments of the present invention, there is provided an isolated polypeptide encoding for a tail of HSIGFACI_PEA_{—}1_P8 (SEQ ID NO:230), comprising a polypeptide being at least 70%, optionally at least about 80%, preferably at least about 85%, more preferably at least about 90% and most preferably at least about 95% homologous to the sequence SRKILLKLRSSVARCSGSLLKFQQFERPRQENCLS (SEQ ID NO:488) in HSIGFACI_PEA_{—}1_P8 (SEQ ID NO:230).

[0162] According to preferred embodiments of the present invention, there is provided an isolated chimeric polypeptide encoding for S56892_PEA_{—}1_P2 (SEQ ID NO:194), comprising a first amino acid sequence being at least 70%, optionally at least 80%, preferably at least 85%, more preferably at least 90% and most preferably at least 95% homologous to a polypeptide having the sequence MNSFSTSKCRKSLALELPAAVEPCVREGCVAQGGLAGGQQQRQAPSCAVSSPLRSLPS GTG (SEQ ID NO:491) corresponding to amino acids 1-61 of S56892_PEA_{—}1_P2 (SEQ ID NO:194), and a second amino acid sequence being at least 90% homologous to AFGPVAFSLGLLLVLPAAFPAPVPPGEDSKDVAAPHRQPLTSSERIDKQIRYILDGISALR KETCNKSNMCESSKEALAENNLNLPKMAEKDGCFQSGFNEETCLVKIITGLLEFEVYLE YLQNRFESSEEQARAVQMSTKVLIQFLQKKAKNLDAITTPDPTTNASLLTKLQAQNQW LQDMTTHLILRSFKEFLQSSLRALRQM corresponding to amino acids 8-212 of IL6_HUMAN (SEQ ID NO:193), which also corresponds to amino acids 62-266 of S56892_PEA_{—}1_P2 (SEQ ID NO:194), wherein said first amino acid sequence and second amino acid sequence are contiguous and in a sequential order.

[0163] According to preferred embodiments of the present invention, there is provided an isolated polypeptide encoding for a head of S56892_PEA_{—}1_P2 (SEQ ID NO:194), comprising a polypeptide being at least 70%, optionally at least about 80%, preferably at least about 85%, more preferably at least about 90% and most preferably at least about 95% homologous to the sequence MNSFSTSKCRKSLALELPAAVEPCVREGCVAQGGLAGGQQQRQAPSCAVSSPLRSLPS GTG (SEQ ID NO:491) of S56892_PEA_{—}1_P2 (SEQ ID NO:194).

[0164] According to preferred embodiments of the present invention, there is provided an isolated chimeric polypeptide encoding for S56892_PEA_{—}1_P8 (SEQ ID NO:195), comprising a first amino acid sequence being at least 90% homologous to MNSFSTSAFGPVAFSLGLLLVLPAAFPAPVPPGEDSKDVAAPHRQPLTSSERIDKQIRYIL DGISALRKETCNKSNMCESSKEALAENNLNLPKMAEKDGCFQSGFNEETCLVKIITGLL EFEVYLEYLQNRFESSEEQARAVQMSTKVLIQFLQKK corresponding to amino acids 1-157 of IL6_HUMAN (SEQ ID NO:193), which also corresponds to amino acids 1-157 of S56892_PEA_{—}1_P8 (SEQ ID NO:195), and a second amino acid sequence being at least 70%, optionally at least 80%, preferably at least 85%, more preferably at least 90% and most preferably at least 95% homologous to a polypeptide having the sequence VGVSSFPQLGVGEDRLKDSVLDNSGMQCHFQKRRLHVNKRV (SEQ ID NO:492) corresponding to amino acids 158-198 of S56892-PEA_{—}1_P8 (SEQ ID NO:195), wherein said first amino acid sequence and second amino acid sequence are contiguous and in a sequential order.

[0165] According to preferred embodiments of the present invention, there is provided an isolated polypeptide encoding for a tail of S56892_PEA_{—}1_P8 (SEQ ID NO:195), comprising a polypeptide being at least 70%, optionally at least about 80%, preferably at least about 85%, more preferably at least about 90% and most preferably at least about 95% homologous to the sequence VGVSSFPQLGVGEDRLKDSVLDNSGMQCHFQKRRLHVNKRV (SEQ ID NO:492) in S56892_PEA_{—}1_P8 (SEQ ID NO:195).

[0166] According to preferred embodiments of the present invention, there is provided an isolated chimeric polypeptide encoding for S56892_PEA_{—}1_P9 (SEQ ID NO:196), comprising a first amino acid sequence being at least 90% homologous to MNSFSTSAFGPVAFSLGLLLVLPAAFPAPVPPGEDSKDVAAPHRQPLTSSERIDKQIRYIL DGISALRKETCNKSNMCESSKEALAENNLNLPKMAEKDGCFQSGFNE corresponding to amino acids 1-108 of IL6_HUMAN (SEQ ID NO:193), which also corresponds to amino acids 1-108 of S56892_PEA_{—}1_P9 (SEQ ID NO:196), and a second amino acid sequence being at least 90% homologous to AKNLDAITTPDPTTNASLLTKLQAQNQWLQDMTTHLILRSFKEFLQSSLRALRQM corresponding to amino acids 158-212 of IL6_HUMAN (SEQ ID NO:193), which also corresponds to amino acids 109-163 of S56892_PEA_{—}1_P9 (SEQ ID NO:196), wherein said first amino acid sequence and second amino acid sequence are contiguous and in a sequential order.

[0167] According to preferred embodiments of the present invention, there is provided an isolated chimeric polypeptide encoding for an edge portion of S56892_PEA_{—}1_P9 (SEQ ID NO:196), comprising a polypeptide having a length “n”, wherein n is at least about 10 amino acids in length, optionally at least about 20 amino acids in length, preferably at least about 30 amino acids in length, more preferably at least about 40 amino acids in length and most preferably at least about 50 amino acids in length, wherein at least two amino acids comprise EA, having a structure as follows: a sequence starting from any of amino acid numbers 108−x to 108; and ending at any of amino acid numbers 109+((n−2)−x), in which x varies from 0 to n−2.

[0168] According to preferred embodiments of the present invention, there is provided an isolated chimeric polypeptide encoding for S56892_PEA_{—}1_P11 (SEQ ID NO:197), comprising a first amino acid sequence being at least 90% homologous to MNSFSTSAFGPVAFSLGLLLVLPAAFPAPVPPGEDSKDVAAPHRQPLTSSERIDKQIRYIL DGISALRKETCNKSN corresponding to amino acids 1-76 of IL6_HUMAN (SEQ ID NO:193), which also corresponds to amino acids 1-76 of S56892_PEA_{—}1_P11 (SEQ ID NO:197), and a second amino acid sequence being at least 70%, optionally at least 80%, preferably at least 85%, more preferably at least 90% and most preferably at least 95% homologous to a polypeptide having the sequence IWLKKMDASNLDSMRRLAW (SEQ ID NO:493) corresponding to amino acids 77-95 of S56892_PEA_{—}1_P11 (SEQ ID NO:197), wherein said first amino acid sequence and second amino acid sequence are contiguous and in a sequential order.

[0169] According to preferred embodiments of the present invention, there is provided an isolated polypeptide encoding for a tail of S56892_PEA_{—}1_P11 (SEQ ID NO:197), comprising a polypeptide being at least 70%, optionally at least about 80%, preferably at least about 85%, more preferably at least about 90% and most preferably at least about 95% homologous to the sequence IWLKKMDASNLDSMRRLAW (SEQ ID NO:493) in S56892_PEA_{—}1_P11 (SEQ ID NO:197).

[0170] According to preferred embodiments of the present invention, there is provided an isolated chimeric polypeptide encoding for HSHGFR_P6 (SEQ ID NO:165), comprising a first amino acid sequence being at least 90% homologous to MWVTKLLPALLLQHVLLHLLLLPIAIPYAEGQRKRRNTIHEFKKSAKTTLIKIDPALKIKT KKVNTADQCANRCTRNKGLPFTCKAFVFDKARKQCLWFPFNSMSSGVKKEFGHEFDL YENKDYIRNCIIGKGRSYKGTVSITKSGIKCQPWSSMIPHEHSFLPSSYRGKDLQENYCR NPRGEEGGPWCFTSNPEVRYEVCDIPQCSEVECMTCNGESYRGLMDHTESGKICQRWD HQTPHRHKFLPERYPDKGFDDNYCRNPDGQPRPWCYTLDPHTRWEYCAIKTCA corresponding to amino acids 1-289 of HGF_HUMAN (SEQ ID NO:164), which also corresponds to amino acids 1-289 of HSHGFR_P6 (SEQ ID NO:165), and a second amino acid sequence being at least 70%, optionally at least 80%, preferably at least 85%, more preferably at least 90% and most preferably at least 95% homologous to a polypeptide having the sequence E corresponding to amino acids 290-290 of HSHGFR_P6 (SEQ ID NO:165), wherein said first amino acid sequence and second amino acid sequence are contiguous and in a sequential order.

[0171] According to preferred embodiments of the present invention, there is provided an isolated chimeric polypeptide encoding for HSHGFR_P11 (SEQ ID NO:166), comprising a first amino acid sequence being at least 90% homologous to MWVTKLLPALLLQHVLLHLLLLPIAIPYAEGQRKRRNTIHEFKKSAKTTLIKIDPALKIKT KKVNTADQCANRCTRNKGLPFTCKAFVFDKARKQCLWFPFNSMSSGVKKEFGHEFDL YENKDYIRNCIIGKGRSYKGTVSITKSGIKCQPWSSMIPHEH corresponding to amino acids 1-160 of HGF_HUMAN (SEQ ID NO:164), which also corresponds to amino acids 1-160 of HSHGFR_P11 (SEQ ID NO:166), a second amino acid sequence being at least 90% homologous to SYRGKDLQENYCRNPRGEEGGPWCFTSNPEVRYEVCDIPQCSE corresponding to amino acids 166-208 of HGF_HUMAN (SEQ ID NO:164), which also corresponds to amino acids 161-203 of HSHGFR_P11 (SEQ ID NO:166), and a third amino acid sequence being at least 70%, optionally at least 80%, preferably at least 85%, more preferably at least 90% and most preferably at least 95% homologous to a polypeptide having the sequence GK corresponding to amino acids 204-205 of HSHGFR_P11 (SEQ ID NO:166), wherein said first amino acid sequence, second amino acid sequence and third amino acid sequence are contiguous and in a sequential order.

[0172] According to preferred embodiments of the present invention, there is provided an isolated chimeric polypeptide encoding for an edge portion of HSHGFR_P11 (SEQ ID NO:166), comprising a polypeptide having a length “n”, wherein n is at least about 10 amino acids in length, optionally at least about 20 amino acids in length, preferably at least about 30 amino acids in length, more preferably at least about 40 amino acids in length and most preferably at least about 50 amino acids in length, wherein at least two amino acids comprise HS, having a structure as follows: a sequence starting from any of amino acid numbers 160−x to 160; and ending at any of amino acid numbers 161+((n−2)−x), in which x varies from 0 to n−2.

[0173] According to preferred embodiments of the present invention, there is provided an isolated chimeric polypeptide encoding for HSHGFR_P12 (SEQ ID NO:167), comprising a first amino acid sequence being at least 90% homologous to MWVTKLLPALLLQHVLLHLLLLPIAIPYAEGQRKRRNTIHEFKKSAKTTLIKIDPALKIKT KKVNTADQCANRCTRNKGLPFTCKAFVFDKARKQCLWFPFNSMSSGVKKEFGHEFDL YENKDYIRNCIIGKGRSYKGTVSITKSGIKCQPWSSMIPHEH corresponding to amino acids 1-160 of HGF_HUMAN (SEQ ID NO:164), which also corresponds to amino acids 1-160 of HSHGFR_P12 (SEQ ID NO:167), and a second amino acid sequence being at least 70%, optionally at least 80%, preferably at least 85%, more preferably at least 90% and most preferably at least 95% homologous to a polypeptide having the sequence R corresponding to amino acids 161-161 of HSHGFR_P12 (SEQ ID NO:167), wherein said first amino acid sequence and second amino acid sequence are contiguous and in a sequential order.

[0174] According to preferred embodiments of the present invention, there is provided an isolated chimeric polypeptide encoding for HSHGFR_P13 (SEQ ID NO:168), comprising a first amino acid sequence being at least 90% homologous to MWVTKLLPALLLQHVLLHLLLLPIAIPYAEGQRKRRNTIHEFKKSAKTTLIKIDPALKIKT KKVNTADQCANRCTRNKGLPFTCKAFVFDKARKQCLWFPFNSMSSGVKKEFGHEFDL YENKDYIRNCIIGKGRSYKGTVSITKSGIKCQPWSSMIPHEHSFLPSSYRGKDLQENYCR NPRGEEGGPWCFTSNPEVRYEVCDIPQCSEVECMTCNGESYRGLMDHTESGKICQRWD HQTPHRHKFLPERYPDKGFDDNYCRNPDGQPRPWCYTLDPHTRWEYCAIK corresponding to amino acids 1-286 of HGF_HUMAN (SEQ ID NO:164), which also corresponds to amino acids 1-286 of HSHGFR_P13 (SEQ ID NO:168), and a second amino acid sequence being at least 70%, optionally at least 80%, preferably at least 85%, more preferably at least 90% and most preferably at least 95% homologous to a polypeptide having the sequence NMRDITWALN (SEQ ID NO:494) corresponding to amino acids 287-296 of HSHGFR_P13 (SEQ ID NO:168), wherein said first amino acid sequence and second amino acid sequence are contiguous and in a sequential order.

[0175] According to preferred embodiments of the present invention, there is provided an isolated polypeptide encoding for a tail of HSHGFR_P13 (SEQ ID NO:168), comprising a polypeptide being at least 70%, optionally at least about 80%, preferably at least about 85%, more preferably at least about 90% and most preferably at least about 95% homologous to the sequence NMRDITWALN (SEQ ID NO:494) in HSHGFR_P13 (SEQ ID NO:168).

[0176] According to preferred embodiments of the present invention, there is provided an isolated chimeric polypeptide encoding for HUMHPA1B_PEA_{—}1_P61 (SEQ ID NO:133), comprising a first amino acid sequence being at least 90% homologous to MSALGAVIALLLWGQLFAVDSGNDVTDI corresponding to amino acids 1-28 of HPT_HUMAN (SEQ ID NO:131), which also corresponds to amino acids 1-28 of HUMHPA1B_PEA_{—}1_P61 (SEQ ID NO:133), and a second amino acid sequence being at least 90% homologous to ADDGCPKPPEIAHGYVEHSVRYQCKNYYKLRTEGDGVYTLNNEKQWINKAVGDKLPE CEAVCGKPKNPANPVQRILGGHLDAKGSFPWQAKMVSHHNLTTGATLINEQWLLTTA KNLFLNHSENATAKDIAPTLTLYVGKKQLVEIEKVVLHPNYSQVDIGLIKLKQKVSVNE RVMPICLPSKDYAEVGRVGYVSGWGRNANFKFTDHLKYVMLPVADQDQCIRHYEGST VPEKKTPKSPVGVQPILNEHTFCAGMSKYQEDTCYGDAGSAFAVHDLEEDTWYATGIL SFDKSCAVAEYGVYVKVTSIQDWVQKTIAEN corresponding to amino acids 88-406 of HPT_HUMAN (SEQ ID NO:131), which also corresponds to amino acids 29-347 of HUMHPA1B_PEA_{—}1_P61 (SEQ ID NO:133), wherein said first amino acid sequence and second amino acid sequence are contiguous and in a sequential order.

[0177] According to preferred embodiments of the present invention, there is provided an isolated chimeric polypeptide encoding for an edge portion of HUMHPA1B_PEA_{—}1_P61 (SEQ ID NO:133), comprising a polypeptide having a length “n”, wherein n is at least about 10 amino acids in length, optionally at least about 20 amino acids in length, preferably at least about 30 amino acids in length, more preferably at least about 40 amino acids in length and most preferably at least about 50 amino acids in length, wherein at least two amino acids comprise IA, having a structure as follows: a sequence starting from any of amino acid numbers 28−x to 28; and ending at any of amino acid numbers 29+((n−2)−x), in which x varies from 0 to n−2.

[0178] According to preferred embodiments of the present invention, there is provided an isolated chimeric polypeptide encoding for HUMHPA1B_PEA_{—}1_P62 (SEQ ID NO:134), comprising a first amino acid sequence being at least 90% homologous to MSALGAVIALLLWGQLFAVDSGNDVTDIADDGCPKPPEIAHGYVEHSVRYQCKNYYK LRTEGDG corresponding to amino acids 1-64 of HPT_HUMAN (SEQ ID NO:131), which also corresponds to amino acids 1-64 of HUMHPA1B_PEA_{—}1_P62 (SEQ ID NO:134), and a second amino acid sequence being at least 70%, optionally at least 80%, preferably at least 85%, more preferably at least 90% and most preferably at least 95% homologous to a polypeptide having the sequence KMWTTVSMPYIQPPSLTFP (SEQ ID NO:495) corresponding to amino acids 65-83 of HUMHPA1B_PEA_{—}1_P62 (SEQ ID NO:134), wherein said first amino acid sequence and second amino acid sequence are contiguous and in a sequential order.

[0179] According to preferred embodiments of the present invention, there is provided an isolated polypeptide encoding for a tail of HUMHPA1B_PEA_{—}1_P62 (SEQ ID NO:134), comprising a polypeptide being at least 70%, optionally at least about 80%, preferably at least about 85%, more preferably at least about 90% and most preferably at least about 95% homologous to the sequence KMWTTVSMPYIQPPSLTFP (SEQ ID NO:495) in HUMHPA1B_PEA_{—}1_P62 (SEQ ID NO:134).

[0180] According to preferred embodiments of the present invention, there is provided an isolated chimeric polypeptide encoding for HUMHPA1B_PEA_{—}1_P64 (SEQ ID NO:135), comprising a first amino acid sequence being at least 90% homologous to MSALGAVIALLLWGQLFAVDSGNDVTDIADDGCPKPPEIAHGYVEHSVRYQCKNYYK LRTEGDGVYTLNDKKQWfNKAVGDKLPECEADDGCPKPPEIAHGYVEHSVRYQCKNY YKLRTEGDG corresponding to amino acids 1-123 of HPT_HUMAN (SEQ ID NO:131), which also corresponds to amino acids 1-123 of HUMHPA1B_PEA_{—}1_P64 (SEQ ID NO:135), and a second amino acid sequence being at least 70%, optionally at least 80%, preferably at least 85%, more preferably at least 90% and most preferably at least 95% homologous to a polypeptide having the sequence KMWTTVSMPYIQPPSLTFP (SEQ ID NO:495) corresponding to amino acids 124-142 of HUMHPA1B_PEA_{—}1_P64 (SEQ ID NO:135), wherein said first amino acid sequence and second amino acid sequence are contiguous and in a sequential order.

[0181] According to preferred embodiments of the present invention, there is provided an isolated polypeptide encoding for a tail of HUMEPA1B_PEA_{—}1_P64 (SEQ ID NO:135), comprising a polypeptide being at least 70%, optionally at least about 80%, preferably at least about 85%, more preferably at least about 90% and most preferably at least about 95% homologous to the sequence KMWTTVSMPYIQPPSLTFP (SEQ ID NO:495) in HUMHPA1B_PEA_{—}1_P64 (SEQ ID NO:135).

[0182] According to preferred embodiments of the present invention, there is provided an isolated chimeric polypeptide encoding for HUMHPA1B_PEA_{—}1_P65 (SEQ ID NO:136), comprising a first amino acid sequence being at least 90% homologous to MSALGAVIALLLWGQLFAVDSGNDVTDIADDGCPKPPEIAHGYVEHSVRYQCKNYYK LRTEGDGVYTLNDKKQWINKAVGDKLPECEADDGCPKPPEIAHGYVEHSVRYQCKNY YKLRTEGDGVYTLNNEKQWINKAVGDKLPECEA corresponding to amino acids 1-147 of HPT_HUMAN (SEQ ID NO:131), which also corresponds to amino acids 1-147 of HUMHPA1B_PEA_{—}1_P65 (SEQ ID NO:136), and a second amino acid sequence being at least 70%, optionally at least 80%, preferably at least 85%, more preferably at least 90% and most preferably at least 95% homologous to a polypeptide having the sequence GGC corresponding to amino acids 148-150 of HUMHPA1B_PEA_{—}1_P65 (SEQ ID NO:136), wherein said first amino acid sequence and second amino acid sequence are contiguous and in a sequential order.

[0183] According to preferred embodiments of the present invention, there is provided an isolated chimeric polypeptide encoding for HUMHPA1B_PEA_{—}1_P68 (SEQ ID NO:137), comprising a first amino acid sequence being at least 90% homologous to MSALGAVIALLLWGQLFAVDSGNDVTDIADDGCPKPPEIAHGYVEHSVRYQCKNYYK LRTEGDGVYTLNDK corresponding to amino acids 1-71 of HPT_HUMAN (SEQ ID NO:131), which also corresponds to amino acids 1-71 of HUMHPA1B_PEA_{—}1_P68 (SEQ ID NO:137), and a second amino acid sequence being at least 90% homologous to KQWINKAVGDKLPECEAVCGKPKNPANPVQRILGGHLDAKGSFPWQAKMVSHHNLTT GATLINEQWLLTTAKNLFLNHSENATAKDIAPTLTLYVGKKQLVEIEKVVLHPNYSQVD IGLIKLKQKVSVNERVMPICLPSKDYAEVGRVGYVSGWGRNANFKFTDHLKYVMLPV ADQDQCIRHYEGSTVPEKKTPKSPVGVQPILNEHTFCAGMSKYQEDTCYGDAGSAFAV HDLEEDTWYATGILSFDKSCAVAEYGVYVKVTSIQDWVQKTIAEN corresponding to amino acids 131-406 of HPT_HUMAN (SEQ ID NO:131), which also corresponds to amino acids 72-347 of HUMHPA1B_PEA_{—}1P68 (SEQ ID NO:137), wherein said first amino acid sequence and second amino acid sequence are contiguous and in a sequential order.

[0184] According to preferred embodiments of the present invention, there is provided an isolated chimeric polypeptide encoding for an edge portion of HUMHPA1B_PEA_{—}1P68 (SEQ ID NO:137), comprising a polypeptide having a length “n”, wherein n is at least about 10 amino acids in length, optionally at least about 20 amino acids in length, preferably at least about 30 amino acids in length, more preferably at least about 40 amino acids in length and most preferably at least about 50 amino acids in length, wherein at least two amino acids comprise KK, having a structure as follows: a sequence starting from any of amino acid numbers 71−x to 71; and ending at any of amino acid numbers 72+((n−2)−x), in which x varies from 0 to n−2.

[0185] According to preferred embodiments of the present invention, there is provided an isolated chimeric polypeptide encoding for HUMHPA1B_PEA_{—}1_P72 (SEQ ID NO:138), comprising a first amino acid sequence being at least 90% homologous to MSALGAVIALLLWGQLFAVDSGNDVTDIADDGCPKPPEIAHGYVEHSVRYQCKNYYK LRTEGD corresponding to amino acids 1-63 of HPT_HUMAN (SEQ ID NO:131), which also corresponds to amino acids 1-63 of HUMHPA1B_PEA_{—}1_P72 (SEQ ID NO:138), and a second amino acid sequence being at least 70%, optionally at least 80%, preferably at least 85%, more preferably at least 90% and most preferably at least 95% homologous to a polypeptide having the sequence ESGKPSAADPGWTPGCQRQLSLAG (SEQ ID NO:497) corresponding to amino acids 64-87 of HUMHPA1B_PEA_{—}1_P72 (SEQ ID NO:138), wherein said first amino acid sequence and second amino acid sequence are contiguous and in a sequential order.

[0186] According to preferred embodiments of the present invention, there is provided an isolated polypeptide encoding for a tail of HUMHPA1B_PEA_{—}1_P72 (SEQ ID NO:138), comprising a polypeptide being at least 70%, optionally at least about 80%, preferably at least about 85%, more preferably at least about 90% and most preferably at least about 95% homologous to the sequence ESGKPSAADPGWTPGCQRQLSLAG (SEQ ID NO:497) in HUMHPA1B_PEA_{—}1_P72 (SEQ ID NO:138).

[0187] According to preferred embodiments of the present invention, there is provided an isolated chimeric polypeptide encoding for HUMHPA1B_PEA_{—}1_P75 (SEQ ID NO:139), comprising a first amino acid sequence being at least 90% homologous to MSALGAVIALLLWGQLFAVDSGNDVTDIADDGCPKPPEIAHGYVEHSVRYQCKNYYK LRTEGDGVYTLNDKKQWINKAVGDKLPECEADDGCPKPPEIAHGYVEHSVRYQCKNY YKLRTEGDGVYTLNNEKQWINKAVGDKLPECEA corresponding to amino acids 1-147 of HPT_HUMAN (SEQ ID NO:131), which also corresponds to amino acids 1-147 of HUMHPA1B_PEA_{—}1_P75 (SEQ ID NO:139), and a second amino acid sequence being at least 90% homologous to GATLINEQWLLTTAKNLFLNHSENATAKDIAPTLTLYVGKKQLVEIEKVVLHPNYSQVD IGLIKLKQKVSVNERVMPICLPSKDYAEVGRVGYVSGWGRNANFKFTDHLKYVMLPV ADQDQCIRHYEGSTVPEKKTPKSPVGVQPILNEHTFCAGMSKYQEDTCYGDAGSAFAV HDLEEDTWYATGILSFDKSCAVAEYGVYVKVTSIQDWVQKTIAEN corresponding to amino acids 188-406 of HPT_HUMAN (SEQ ID NO:131), which also corresponds to amino acids 148-366 of HUMHPA1B_PEA_{—}1_P75 (SEQ ID NO:139), wherein said first amino acid sequence and second amino acid sequence are contiguous and in a sequential order.

[0188] According to preferred embodiments of the present invention, there is provided an isolated chimeric polypeptide encoding for an edge portion of HUMHPA1B_PEA_{—}1_P75 (SEQ ID NO:139), comprising a polypeptide having a length “n”, wherein n is at least about 10 amino acids in length, optionally at least about 20 amino acids in length, preferably at least about 30 amino acids in length, more preferably at least about 40 amino acids in length and most preferably at least about 50 amino acids in length, wherein at least two amino acids comprise AG, having a structure as follows: a sequence starting from any of amino acid numbers 147−x to 147; and ending at any of amino acid numbers 148+((n−2)−x), in which x varies from 0 to n−2.

[0189] According to preferred embodiments of the present invention, there is provided an isolated chimeric polypeptide encoding for HUMHPA1B_PEA_{—}1_P76 (SEQ ID NO:140), comprising a first amino acid sequence being at least 90% homologous to MSALGAVIALLLWGQLFAVDSGNDVTDIADDGCPKPPEIAHGYVEHSVRYQ corresponding to amino acids 1-51 of HPT_HUMAN (SEQ ID NO:131), which also corresponds to amino acids 1-51 of HUMHPA1B_PEA_{—}1_P76 (SEQ ID NO:140), a second amino acid sequence bridging amino acid sequence comprising of L, and a third amino acid sequence being at least 90% homologous to QRILGGHLDAKGSFPWQAKMVSHHNLTTGATLINEQWLLTTAKNLFLNHSENATAKDI APTLTLYVGKKQLVEIEKVVLHPNYSQVDIGLIKLKQKVSVNERVMPICLPSKDYAEVG RVGYVSGWGRNANFKFTDHLKYVMLPVADQDQCIRHYEGSTVPEKKTPKSPVGVQPIL NEHTFCAGMSKYQEDTCYGDAGSAFAVHDLEEDTWYATGILSFDKSCAVAEYGVYVK VTSIQDWVQKTIAEN corresponding to amino acids 160-406 of HPT_HUMAN (SEQ ID NO:131), which also corresponds to amino acids 53-299 of HUMHPA1B_PEA_{—}1_P76 (SEQ ID NO:140), wherein said first amino acid sequence, second amino acid sequence and third amino acid sequence are contiguous and in a sequential order.

[0190] According to preferred embodiments of the present invention, there is provided an isolated polypeptide encoding for an edge portion of HUMHPA1B_PEA_{—}1_P76 (SEQ ID NO:140), comprising a polypeptide having a length “n”, wherein n is at least about 10 amino acids in length, optionally at least about 20 amino acids in length, preferably at least about 30 amino acids in length, more preferably at least about 40 amino acids in length and most preferably at least about 50 amino acids in length, wherein at least three amino acids comprise QLQ having a structure as follows (numbering according to HUMHPA1B_PEA_{—}1_P76 (SEQ ID NO:140)): a sequence starting from any of amino acid numbers 51−x to 51; and ending at any of amino acid numbers 53+((n−2)−x), in which x varies from 0 to n−2.

[0191] According to preferred embodiments of the present invention, there is provided an isolated chimeric polypeptide encoding for HUMHPA1B_PEA_{—}1_P81 (SEQ ID NO:141), comprising a first amino acid sequence being at least 90% homologous to MSALGAVIALLLWGQLFAVDSGNDVTDIADDGCPKPPEIAHGYVEHSVRYQCKNYYK LRTEGDGVYTLNDKKQWINKAVGDKLPECEA corresponding to amino acids 1-88 of HPT_HUMAN (SEQ ID NO:131), which also corresponds to amino acids 1-88 of HUMHPA1B_PEA_{—}1_P81 (SEQ ID NO:141), and a second amino acid sequence being at least 90% homologous to GATLINEQWLLTTAKNLFLNHSENATAKDIAPTLTLYVGKKQLVEIEKVVLHPNYSQVD IGLIKLKQKVSVNERVMPICLPSKDYAEVGRVGYVSGWGRNANFKFTDHLKYVMLPV ADQDQCIRHYEGSTVPEKKTPKSPVGVQPILNEHTFCAGMSKYQEDTCYGDAGSAFAV HDLEEDTWYATGILSFDKSCAVAEYGVYVKVTSIQDWVQKTIAEN corresponding to amino acids 188-406 of HPT_HUMAN (SEQ ID NO:131), which also corresponds to amino acids 89-307 of HUMHPA1B_PEA_{—}1_P81 (SEQ ID NO:141), wherein said first amino acid sequence and second amino acid sequence are contiguous and in a sequential order.

[0192] According to preferred embodiments of the present invention, there is provided an isolated chimeric polypeptide encoding for an edge portion of HUMHPA1B_PEA_{—}1_P81 (SEQ ID NO:141), comprising a polypeptide having a length “n”, wherein n is at least about 10 amino acids in length, optionally at least about 20 amino acids in length, preferably at least about 30 amino acids in length, more preferably at least about 40 amino acids in length and most preferably at least about 50 amino acids in length, wherein at least two amino acids comprise AG, having a structure as follows: a sequence starting from any of amino acid numbers 88−x to 88; and ending at any of amino acid numbers 89+((n−2)−x), in which x varies from 0 to n−2.

[0193] According to preferred embodiments of the present invention, there is provided an isolated chimeric polypeptide encoding for HUMBPA1B_PEA_{—}1_P83 (SEQ ID NO:142), comprising a first amino acid sequence being at least 90% homologous to MSALGAVIALLLWGQLFAVDSGNDVTDIAD corresponding to amino acids 1-30 of HPT_HUMAN (SEQ ID NO:131), which also corresponds to amino acids 1-30 of HUMHPA1B_PEA_{—}1_P83 (SEQ ID NO:142), and a second amino acid sequence being at least 70%, optionally at least 80%, preferably at least 85%, more preferably at least 90% and most preferably at least 95% homologous to a polypeptide having the sequence GFPP (SEQ ID NO:498) corresponding to amino acids 31-34 of HUMHPA1B_PEA_{—}1_P83 (SEQ ID NO:142), wherein said first amino acid sequence and second amino acid sequence are contiguous and in a sequential order.

[0194] According to preferred embodiments of the present invention, there is provided an isolated polypeptide encoding for a tail of HUMHPA1B_PEA_{—}1_P83 (SEQ ID NO:142), comprising a polypeptide being at least 70%, optionally at least about 80%, preferably at least about 85%, more preferably at least about 90% and most preferably at least about 95% homologous to the sequence GFPP (SEQ ID NO:498) in HUMHPA1B_PEA_{—}1_P83 (SEQ ID NO:142).

[0195] According to preferred embodiments of the present invention, there is provided an isolated chimeric polypeptide encoding for HUMHPA1B_PEA_{—}1_P106 (SEQ ID NO:143), comprising a first amino acid sequence being at least 90% homologous to MSALGAVIALLLWGQLFAVDSGNDVTDIADDGCPKPPEIAHGYVEHSVRYQCKNYYK LRTEGDGVYTLNN corresponding to amino acids 1-70 of HPT_HUMAN_V1 (SEQ ID NO:132), which also corresponds to amino acids 1-70 of HUMHPA1B_PEA_{—}1_P106 (SEQ ID NO:143), a bridging amino acid E corresponding to amino acid 71 of HUMHPA1B_PEA_{—}1_P106 (SEQ ID NO:143), a bridging amino acid E corresponding to amino acid 71 of HUMHPA1B_PEA_{—}1_P106 (SEQ ID NO:143), a second amino acid sequence being at least 90% homologous to KQWINKAVGDKLPECEA corresponding to amino acids 72-88 of HPT_HUMAN_V1 (SEQ ID NO:132), which also corresponds to amino acids 72-88 of HUMHPA1B_PEA_{—}1_P106 (SEQ ID NO:143), and a third amino acid sequence being at least 70%, optionally at least 80%, preferably at least 85%, more preferably at least 90% and most preferably at least 95% homologous to a polypeptide having the sequence AHTE (SEQ ID NO:499) corresponding to amino acids 89-92 of HUMHPA1B_PEA_{—}1_P106 (SEQ ID NO:143), wherein said first amino acid sequence, bridging amino acid, bridging amino acid, second amino acid sequence and third amino acid sequence are contiguous and in a sequential order.

[0196] According to preferred embodiments of the present invention, there is provided an isolated polypeptide encoding for a tail of HUMHPA1B_PEA_{—}1_P106 (SEQ ID NO:143), comprising a polypeptide being at least 70%, optionally at least about 80%, preferably at least about 85%, more preferably at least about 90% and most preferably at least about 95% homologous to the sequence AHTE (SEQ ID NO:499) in HUMHPA1B_PEA_{—}1_P106 (SEQ ID NO:143).

[0197] According to preferred embodiments of the present invention, there is provided an isolated chimeric polypeptide encoding for HUMHPA1B_PEA_{—}1_P107 (SEQ ID NO:144), comprising a first amino acid sequence being at least 90% homologous to MSALGAVIALLLWGQLFAVDSGNDVTDI corresponding to amino acids 1-28 of HPT_HUMAN (SEQ ID NO:131), which also corresponds to amino acids 1-28 of HUMHPA1B_PEA_{—}1_P107 (SEQ ID NO:144), a second amino acid sequence being at least 90% homologous to ADDGCPKPPEIAHGYVEHSVRYQCKNYYKLRTEGDGVYTLNNEKQWINKAVGDKLPE CEAVCGKPKNPANPVQRILGGHLDAKGSFPWQAKMVSHHNLTT corresponding to amino acids 88-187 of HPT_HUMAN (SEQ ID NO:131), which also corresponds to amino acids 29-128 of HUMHPA1B_PEA_{—}1_P107 (SEQ ID NO:144), and a third amino acid sequence being at least 70%, optionally at least 80%, preferably at least 85%, more preferably at least 90% and most preferably at least 95% homologous to a polypeptide having the sequence VPLPFTTWRRTPGMRLGS (SEQ ID NO:500) corresponding to amino acids 129-146 of HUMHPA1B_PEA_{—}1_P107 (SEQ ID NO:144), wherein said first amino acid sequence, second amino acid sequence and third amino acid sequence are contiguous and in a sequential order.

[0198] According to preferred embodiments of the present invention, there is provided an isolated chimeric polypeptide encoding for an edge portion of HUMHPA1B_PEA_{—}1_P107 (SEQ ID NO:144), comprising a polypeptide having a length “n”, wherein n is at least about 10 amino acids in length, optionally at least about 20 amino acids in length, preferably at least about 30 amino acids in length, more preferably at least about 40 amino acids in length and most preferably at least about 50 amino acids in length, wherein at least two amino acids comprise IA, having a structure as follows: a sequence starting from any of amino acid numbers 28-x to 28; and ending at any of amino acid numbers 29+((n−2)−x), in which x varies from 0 to n-2.

[0199] According to preferred embodiments of the present invention, there is provided an isolated polypeptide encoding for a tail of HUMHPA1B_PEA_{—}1_P107 (SEQ ID NO:144), comprising a polypeptide being at least 70%, optionally at least about 80%, preferably at least about 85%, more preferably at least about 90% and most preferably at least about 95% homologous to the sequence VPLPFTTWRRTPGMRLGS (SEQ ID NO:500) in HUMHPA1B_PEA_{—}1_P107 (SEQ ID NO:144).

[0200] According to preferred embodiments of the present invention, there is provided an isolated chimeric polypeptide encoding for HUMHPA1B_PEA_{—}1_P115 (SEQ ID NO:145), comprising a first amino acid sequence being at least 90% homologous to MSALGAVIALLLWGQLFAVDSGNDVTDIADDGCPKPPEIAHGYVEHSVRYQCKNYYK LRTEGDGVYTLNDKKQWINKAVGDKLPECEA corresponding to amino acids 1-88 of HPT_HUMAN (SEQ ID NO:131), which also corresponds to amino acids 1-88 of HUMHPA1B_PEA_{—}1_P115 (SEQ ID NO:145), and a second amino acid sequence being at least 70%, optionally at least 80%, preferably at least 85%, more preferably at least 90% and most preferably at least 95% homologous to a polypeptide having the sequence GGC corresponding to amino acids 89-91 of HUMHPA1B_PEA_{—}1_P115 (SEQ ID NO:145), wherein said first amino acid sequence and second amino acid sequence are contiguous and in a sequential order.

[0201] According to preferred embodiments of the present invention, there is provided an isolated chimeric polypeptide encoding for HUMELAM1A_P2 (SEQ ID NO:31), comprising a first amino acid sequence being at least 90% homologous to MIASQFLSALTLVLLIKESGAWSYNTSTEAMTYDEASAYCQQRYTHLVAIQNKEEIEYL NSILSYSPSYYWIGIRKVNNVWVWVGTQKPLTEEAKNWAPGEPNNRQKDEDCVEIYIK REKDVGMWNDERCSKKKLALCYTAACTNTSCSGHGECVETINNYTCKCDPGFSGLKC EQIVNCTALESPEHGSLVCSHPLGNFSYNSSCSISCDRGYLPSSMETMQCMSSGEWSAPI PACNVVECDAVTNPANGFVECFQNPGSFPWNTTCTFDCEEGFELMGAQSLQCTSSGNW DNEKPTCKAVTCRAVRQPQNGSVRCSHSPAGEFTFKSSCNFTCEEGFMLQGPAQVECT TQGQWTQQIPVCEAFQCTALSNPERGYMNCLPSASGSFRYGSSCEFSCEQGFVLKGSKR LQCGPTGEWDNEKPTCE corresponding to amino acids 1-426 of LEM2_HUMAN (SEQ ID NO:30), which also corresponds to amino acids 1-426 of HUMELAM1A_P2 (SEQ ID NO:31), and a second amino acid sequence being at least 70%, optionally at least 80%, preferably at least 85%, more preferably at least 90% and most preferably at least 95% homologous to a polypeptide having the sequence GTVFVFILF (SEQ ID NO:501) corresponding to amino acids 427-435 of HUMELAM1A_P2 (SEQ ID NO:31, wherein said first amino acid sequence and second amino acid sequence are contiguous and in a sequential order.

[0202] According to preferred embodiments of the present invention, there is provided an isolated polypeptide encoding for a tail of HUMELAM1A_P2 (SEQ ID NO:31, comprising a polypeptide being at least 70%, optionally at least about 80%, preferably at least about 85%, more preferably at least about 90% and most preferably at least about 95% homologous to the sequence GTVFVFILF (SEQ ID NO:501) in HUMELAM1A_P2 (SEQ ID NO:31).

[0203] According to preferred embodiments of the present invention, there is provided an isolated chimeric polypeptide encoding for S71513_P2 (SEQ ID NO:9), comprising a first amino acid sequence being at least 90% homologous to MKVSAALLCLLLIAATFIPQGLAQPDAINAPVTCCYNFTNRKISVQRLASYRRITSSKCP KEAV corresponding to amino acids 1-64 of SY02_HUMAN, which also corresponds to amino acids 1-64 of S71513_P2 (SEQ ID NO:9), and a second amino acid sequence being at least 70%, optionally at least 80%, preferably at least 85%, more preferably at least 90% and most preferably at least 95% homologous to a polypeptide having the sequence M corresponding to amino acids 65-65 of S71513_P2 (SEQ ID NO:9, wherein said first amino acid sequence and second amino acid sequence are contiguous and in a sequential order.

[0204] According to preferred embodiments of the present invention, there is provided an isolated chimeric polypeptide encoding for HUMELAM1A_P2 (SEQ ID NO:32), comprising a first amino acid sequence being at least 90% homologous to MIASQFLSALTLVLLIKESGAWSYNTSTEAMTYDEASAYCQQRYTHLVAIQNKEEIEYL NSILSYSPSYYWIGIRKVNNVWVWVGTQKPLTEEAKNWAPGEPNNRQKDEDCVEIYIK REKDVGMWNDERCSKKKLALCYTAACTNTSCSGHGECVETINNYTCKCDPGFSGLKC EQIVNCTALESPEHGSLVCSHPLGNFSYNSSCSISCDRGYLPSSMETMQCMSSGEWSAPI PACN corresponding to amino acids 1-238 of LEM2_HUMAN (SEQ ID NO:30), which also corresponds to amino acids 1-238 of HUMELAM1A_P2 (SEQ ID NO:32, and a second amino acid sequence being at least 70%, optionally at least 80%, preferably at least 85%, more preferably at least 90% and most preferably at least 95% homologous to a polypeptide having the sequence GKSL (SEQ ID NO:502) corresponding to amino acids 239-242 of HUMELAM1A_P2 (SEQ ID NO:32), wherein said first amino acid sequence and second amino acid sequence are contiguous and in a sequential order.

[0205] According to preferred embodiments of the present invention, there is provided an isolated polypeptide encoding for a tail of HUMELAM1A_P2 (SEQ ID NO:32, comprising a polypeptide being at least 70%, optionally at least about 80%, preferably at least about 85%, more preferably at least about 90% and most preferably at least about 95% homologous to the sequence GKSL (SEQ ID NO:502) in HUMELAM1A_P2 (SEQ ID NO:32).

[0206] According to preferred embodiments of the present invention, there is provided an isolated chimeric polypeptide encoding for HUMELAM1A_P2 (SEQ ID NO:33), comprising a first amino acid sequence being at least 90% homologous to MIASQFLSALTLVLLIKESGAWSYNTSTEAMTYDEASAYCQQRYTHLVAIQNKEEIEYL NSILSYSPSYYWIGIRKVNNVWVWVGTQKPLTEEAKNWAPGEPNNRQKDEDCVEIYIK REKDVGMWNDERCSKKKLALCYTAACTNTSCSGHGECVETINNYTCKCDPGFSGLKC EQ corresponding to amino acids 1-176 of LEM2_HUMAN (SEQ ID NO:30, which also corresponds to amino acids 1-176 of HUMELAM1A_P2 (SEQ ID NO:33), and a second amino acid sequence being at least 70%, optionally at least 80%, preferably at least 85%, more preferably at least 90% and most preferably at least 95% homologous to a polypeptide having the sequence SKSGSCLFLHLRW (SEQ ID NO:503) corresponding to amino acids 177-189 of HUMELAM1A_P2 (SEQ ID NO:33), wherein said first amino acid sequence and second amino acid sequence are contiguous and in a sequential order.

[0207] According to preferred embodiments of the present invention, there is provided an isolated polypeptide encoding for a tail of HUMELAM1A_P2 (SEQ ID NO:33), comprising a polypeptide being at least 70%, optionally at least about 80%, preferably at least about 85%, more preferably at least about 90% and most preferably at least about 95% homologous to the sequence SKSGSCLFLHLRW (SEQ ID NO:503) in HUMELAM1A_P2 (SEQ ID NO:33).

[0208] According to preferred embodiments of the present invention, there is provided an antibody capable of specifically binding to an epitope of an amino acid sequence as described herein. Optionally and preferably, the amino acid sequence corresponds to a bridge, edge portion, tail, head or insertion as in any of the above described embodiments. For example, the amino acid sequence may optionally correspond to a bridge including amino acids 64 and 65 of SEQ ID NO: 9, of at least about 10 amino acids (amino acids 55-65 of SEQ ID NO:9), preferably at least about 20 amino acids (amino acids 45-65 of SEQ ID NO:9), more preferably at least about 30 amino acids (amino acids 35-65 of SEQ ID NO:9) and most preferably at least about 40 amino acids (amino acids 25-65 of SEQ ID NO:9) in length. More preferably, the antibody is capable of differentiating between a splice variant having the epitope and a corresponding known protein.

[0209] According to preferred embodiments of the present invention, there is provided kit for detecting endometriosis, comprising a kit detecting overexpression of a splice variant according to the above described embodiments. Optionally, the kit comprises a NAT-based technology. Also optionally, the kit further comprises at least one primer pair capable of selectively hybridizing to a nucleic acid sequence according to any of the above described embodiments. Preferably, the kit further comprises at least one oligonucleotide capable of selectively hybridizing to a nucleic acid sequence according to any of the above described embodiments. More preferably, the kit comprises an antibody as described herein. Most preferably, the kit further comprises at least one reagent for performing an ELISA or a Western blot.

[0210] According to preferred embodiments of the present invention, there is provided a method for detecting endometriosis, comprising detecting overexpression and/or underexpression of a splice variant according to any of the above described embodiments. Optionally, detecting overexpression is performed with a NAT-based technology. Alternatively, detecting overexpression is performed with an immunoassay. Preferably, the immunoassay comprises an antibody according to any of the above described embodiments.

[0211] According to preferred embodiments of the present invention, there is provided a biomarker capable of detecting endometriosis, comprising any of the above nucleic acid sequences or a fragment thereof, or any of the above amino acid sequences or a fragment thereof.

[0212] According to preferred embodiments of the present invention, there is provided method for screening for endometriosis, comprising detecting endometriosis cells with a biomarker or an antibody or a method or assay according to any of the above described embodiments or as described herein.

[0213] According to preferred embodiments of the present invention, there is provided a method for diagnosing endometriosis, comprising detecting endometriosis cells with a biomarker or an antibody or a method or assay according to any of the above described embodiments or as described herein.

[0214] According to preferred embodiments of the present invention, there is provided a method for monitoring disease progression and/or treatment efficacy and/or relapse of endometriosis, comprising detecting endometriosis cells with a biomarker or an antibody or a method or assay according to any of the above described embodiments or as described herein.

[0215] According to preferred embodiments of the present invention, there is provided a method of selecting a therapy for endometriosis, comprising detecting endometriosis cells with a biomarker or an antibody or a method or assay according to any of the above described embodiments or as described herein, and selecting a therapy according to the detection.

[0216] Unless defined otherwise, all technical and scientific terms used herein have the meaning commonly understood by a person skilled in the art to which this invention belongs. The following references provide one of skill with a general definition of many of the terms used in this invention: Singleton et al., Dictionary of Microbiology and Molecular Biology (2nd ed. 1994); The Cambridge Dictionary of Science and Technology (Walker ed., 1988); The Glossary of Genetics, 5th Ed., R. Rieger et al. (eds.), Springer Verlag (1991); and Hale & Marham, The Harper Collins Dictionary of Biology (1991). All of these are hereby incorporated by reference as if fully set forth herein. As used herein, the following terms have the meanings ascribed to them unless specified otherwise.

### BRIEF DESCRIPTION OF THE DRAWINGS

[0217] In order to understand the invention and to see how it may be carried out in practice, a preferred embodiment will now be described, by way of non-limiting example only, with reference to the accompanying drawings, in which:

[0218] FIG. 1 shows a comparison of the human and mouse CHL2 variant I and CHL proteins.

[0219] FIG. 2 shows a schematic representation of the human and mouse CHL2 and CHL genes (sequence identification numbers as for FIG. 1).

[0220] FIG. 3 shows alternative splicing of the hCHL2 gene.

### DESCRIPTION OF PREFERRED EMBODIMENTS

[0221] The present invention is of novel markers for endometriosis that are both sensitive and accurate.

[0222] These markers are differentially expressed, and preferably in endometriosis specifically, as opposed to normal tissues. The measurement of these markers, alone or in combination, in patient samples provides information that the diagnostician can correlate with a probable diagnosis of endometriosis. The markers of the present invention, alone or in combination, show a high degree of differential detection between normal and endometriosis states. The markers of the present invention, alone or in combination, can be used for prognosis, prediction, screening, early diagnosis, staging, therapy selection and treatment monitoring of endometriosis. For example, optionally and preferably, these markers may be used for staging endometriosis and/or monitoring the progression of the disease. Also, one or more of the markers may optionally be used in combination with one or more other endometriosis markers (other than those described herein).

[0223] Biomolecular sequences (amino acid and/or nucleic acid sequences) uncovered using the methodology of the present invention and described herein can be efficiently utilized as tissue or pathological markers and/or as drugs or drug targets for treating or preventing a disease.

[0224] These markers are specifically released to the bloodstream under conditions of endometriosis, and/or are otherwise expressed at a much higher level and/or specifically expressed in endometrial tissue or cells. The measurement of these markers, alone or in combination, in patient samples provides information that the diagnostician can correlate with a probable diagnosis of endometriosis.

[0225] The present invention therefore also relates to diagnostic assays for endometriosis, and methods of use of such markers for detection of endometriosis, optionally and preferably in a sample taken from a subject (patient), which is more preferably some type of blood sample.

[0226] In another embodiment, the present invention relates to bridges, tails, heads and/or insertions, and/or analogs, homologs and derivatives of such peptides. Such bridges, tails, heads and/or insertions are described in greater detail below with regard to the Examples.

[0227] As used herein a “tail” refers to a peptide sequence at the end of an amino acid sequence that is unique to a splice variant according to the present invention. Therefore, a splice variant having such a tail may optionally be considered as a chimera, in that at least a first portion of the splice variant is typically highly homologous (often 100% identical) to a portion of the corresponding known protein, while at least a second portion of the variant comprises the tail.

[0228] As used herein a “head” refers to a peptide sequence at the beginning of an amino acid sequence that is unique to a splice variant according to the present invention. Therefore, a splice variant having such a head may optionally be considered as a chimera, in that at least a first portion of the splice variant comprises the head, while at least a second portion is typically highly homologous (often 100% identical) to a portion of the corresponding known protein.

[0229] As used herein “an edge portion” refers to a connection between two portions of a splice variant according to the present invention that were not joined in the wild type or known protein. An edge may optionally arise due to a join between the above “known protein” portion of a variant and the tail, for example, and/or may occur if an internal portion of the wild type sequence is no longer present, such that two portions of the sequence are now contiguous in the splice variant that were not contiguous in the known protein. A “bridge” may optionally be an edge portion as described above, but may also include a join between a head and a “known protein” portion of a variant, or a join between a tail and a “known protein” portion of a variant, or a join between a unique insertion and a “known protein” portion of a variant. Optionally and preferably, a bridge between a tail or a head or a unique insertion, and a “known protein” portion of a variant, comprises at least about 10 amino acids, more preferably at least about 20 amino acids, most preferably at least about 30 amino acids, and even more preferably at least about 40 amino acids, in which at least one amino acid is from the tail/head/insertion and at least one amino acid is from the “known protein” portion of a variant. Also optionally, the bridge may comprise any number of amino acids from about 10 to about 40 amino acids (for example, 10, 11, 12, 13.37, 38, 39, 40 amino acids in length, or any number in between).

[0230] It should be noted that a bridge cannot be extended beyond the length of the sequence in either direction, and it should be assumed that every bridge description is to be read in such manner that the bridge length does not extend beyond the sequence itself.

[0231] Furthermore, bridges are described with regard to a sliding window in certain contexts below. For example, certain descriptions of the bridges feature the following format: a bridge between two edges (in which a portion of the known protein is not present in the variant) may optionally be described as follows: a bridge portion of CONTIG-NAME_P1 (representing the name of the protein), comprising a polypeptide having a length “n”, wherein n is at least about 10 amino acids in length, optionally at least about 20 amino acids in length, preferably at least about 30 amino acids in length, more preferably at least about 40 amino acids in length and most preferably at least about 50 amino acids in length, wherein at least two amino acids comprise XX (2 amino acids in the center of the bridge, one from each end of the edge), having a structure as follows (numbering according to the sequence of CONTIG-NAME_P1): a sequence starting from any of amino acid numbers 49−x to 49 (for example); and ending at any of amino acid numbers 50+((n−2)−x) (for example), in which x varies from 0 to n−2. In this example, it should also be read as including bridges in which n is any number of amino acids between 10-50 amino acids in length. Furthermore, the bridge polypeptide cannot extend beyond the sequence, so it should be read such that 49−x (for example) is not less than 1, nor 50+((n−2)−x) (for example) greater than the total sequence length.

[0232] In another embodiment, this invention provides antibodies specifically recognizing the splice variants and polypeptide fragments thereof of this invention. Preferably such antibodies differentially recognize splice variants of the present invention but do not recognize a corresponding known protein (such known proteins are discussed with regard to their splice variants in the Examples below).

[0233] In another embodiment, this invention provides an isolated nucleic acid molecule encoding for a splice variant according to the present invention, having a nucleotide sequence as set forth in any one of the sequences listed herein, or a sequence complementary thereto. In another embodiment, this invention provides an isolated nucleic acid molecule, having a nucleotide sequence as set forth in any one of the sequences listed herein, or a sequence complementary thereto. In another embodiment, this invention provides an oligonucleotide of at least about 12 nucleotides, specifically hybridizable with the nucleic acid molecules of this invention. In another embodiment, this invention provides vectors, cells, liposomes and compositions comprising the isolated nucleic acids of this invention.

[0234] In another embodiment, this invention provides a method for detecting a splice variant according to the present invention in a biological sample, comprising: contacting a biological sample with an antibody specifically recognizing a splice variant according to the present invention under conditions whereby the antibody specifically interacts with the splice variant in the biological sample but do not recognize known corresponding proteins (wherein the known protein is discussed with regard to its splice variant(s) in the Examples below), and detecting said interaction; wherein the presence of an interaction correlates with the presence of a splice variant in the biological sample.

[0235] In another embodiment, this invention provides a method for detecting a splice variant nucleic acid sequences in a biological sample, comprising: hybridizing the isolated nucleic acid molecules or oligonucleotide fragments of at least about a minimum length to a nucleic acid material of a biological sample and detecting a hybridization complex; wherein the presence of a hybridization complex correlates with the presence of a splice variant nucleic acid sequence in the biological sample.

[0236] According to the present invention, the splice variants described herein are non-limiting examples of markers for diagnosing endometriosis. Each splice variant marker of the present invention can be used alone or in combination, for various uses, including but not limited to, prognosis, prediction, screening, early diagnosis, determination of progression, therapy selection and treatment monitoring of endometriosis.

[0237] According to optional but preferred embodiments of the present invention, any marker according to the present invention may optionally be used alone or combination. Such a combination may optionally comprise a plurality of markers described herein, optionally including any subcombination of markers, and/or a combination featuring at least one other marker, for example a known marker. Furthermore, such a combination may optionally and preferably be used as described above with regard to determining a ratio between a quantitative or semi-quantitative measurement of any marker described herein to any other marker described herein, and/or any other known marker, and/or any other marker. With regard to such a ratio between any marker described herein (or a combination thereof) and a known marker, more preferably the known marker comprises the “known protein” as described in greater detail below with regard to each cluster or gene.

[0238] According to other preferred embodiments of the present invention, a splice variant protein or a fragment thereof, or a splice variant nucleic acid sequence or a fragment thereof, may be featured as a biomarker for detecting endometriosis, such that a biomarker may optionally comprise any of the above.

[0239] According to still other preferred embodiments, the present invention optionally and preferably encompasses any amino acid sequence or fragment thereof encoded by a nucleic acid sequence corresponding to a splice variant protein as described herein. Any oligopeptide or peptide relating to such an amino acid sequence or fragment thereof may optionally also (additionally or alternatively) be used as a biomarker, including but not limited to the unique amino acid sequences of these proteins that are depicted as tails, heads, insertions, edges or bridges. The present invention also optionally encompasses antibodies capable of recognizing, and/or being elicited by, such oligopeptides or peptides.

[0240] The present invention also optionally and preferably encompasses any nucleic acid sequence or fragment thereof, or amino acid sequence or fragment thereof, corresponding to a splice variant of the present invention as described above, optionally for any application.

[0241] Non-limiting examples of methods or assays are described below.

[0242] The present invention also relates to kits based upon such diagnostic methods or assays.

Nucleic Acid Sequences and Oligonucleotides

[0243] Various embodiments of the present invention encompass nucleic acid sequences described hereinabove; fragments thereof, sequences hybridizable therewith, sequences homologous thereto, sequences encoding similar polypeptides with different codon usage, altered sequences characterized by mutations, such as deletion, insertion or substitution of one or more nucleotides, either naturally occurring or artificially induced, either randomly or in a targeted fashion.

[0244] The present invention encompasses nucleic acid sequences described herein; fragments thereof, sequences hybridizable therewith, sequences homologous thereto [e.g., at least 50%, at least 55%, at least 60%, at least 65%, at least 70%, at least 75%, at least 80%, at least 85%, at least 95% or more say 100% identical to the nucleic acid sequences set forth below], sequences encoding similar polypeptides with different codon usage, altered sequences characterized by mutations, such as deletion, insertion or substitution of one or more nucleotides, either naturally occurring or man induced, either randomly or in a targeted fashion. The present invention also encompasses homologous nucleic acid sequences (i.e., which form a part of a polynucleotide sequence of the present invention) which include sequence regions unique to the polynucleotides of the present invention.

[0245] In cases where the polynucleotide sequences of the present invention encode previously unidentified polypeptides, the present invention also encompasses novel polypeptides or portions thereof, which are encoded by the isolated polynucleotide and respective nucleic acid fragments thereof described hereinabove.

[0246] A “nucleic acid fragment” or an “oligonucleotide” or a “polynucleotide” are used herein interchangeably to refer to a polymer of nucleic acids. A polynucleotide sequence of the present invention refers to a single or double stranded nucleic acid sequences which is isolated and provided in the form of an RNA sequence, a complementary polynucleotide sequence (cDNA), a genomic polynucleotide sequence and/or a composite polynucleotide sequences (e.g., a combination of the above).

[0247] As used herein the phrase “complementary polynucleotide sequence” refers to a sequence, which results from reverse transcription of messenger RNA using a reverse transcriptase or any other RNA dependent DNA polymerase. Such a sequence can be subsequently amplified in vivo or in vitro using a DNA dependent DNA polymerase.

[0248] As used herein the phrase “genomic polynucleotide sequence” refers to a sequence derived (isolated) from a chromosome and thus it represents a contiguous portion of a chromosome.

[0249] As used herein the phrase “composite polynucleotide sequence” refers to a sequence, which is composed of genomic and cDNA sequences. A composite sequence can include some exonal sequences required to encode the polypeptide of the present invention, as well as some intronic sequences interposing therebetween. The intronic sequences can be of any source, including of other genes, and typically will include conserved splicing signal sequences. Such intronic sequences may further include cis acting expression regulatory elements.

[0250] Preferred embodiments of the present invention encompass oligonucleotide probes.

[0251] An example of an oligonucleotide probe which can be utilized by the present invention is a single stranded polynucleotide which includes a sequence complementary to the unique sequence region of any variant according to the present invention, including but not limited to a nucleotide sequence coding for an amino sequence of a bridge, tail, head and/or insertion according to the present invention, and/or the equivalent portions of any nucleotide sequence given herein (including but not limited to a nucleotide sequence of a node, segment or amplicon described herein).

[0252] Alternatively, an oligonucleotide probe of the present invention can be designed to hybridize with a nucleic acid sequence encompassed by any of the above nucleic acid sequences, particularly the portions specified above, including but not limited to a nucleotide sequence coding for an amino sequence of a bridge, tail, head and/or insertion according to the present invention, and/or the equivalent portions of any nucleotide sequence given herein (including but not limited to a nucleotide sequence of a node, segment or amplicon described herein).

[0253] Oligonucleotides designed according to the teachings of the present invention can be generated according to any oligonucleotide synthesis method known in the art such as enzymatic synthesis or solid phase synthesis. Equipment and reagents for executing solid-phase synthesis are commercially available from, for example, Applied Biosystems. Any other means for such synthesis may also be employed; the actual synthesis of the oligonucleotides is well within the capabilities of one skilled in the art and can be accomplished via established methodologies as detailed in, for example, “Molecular Cloning: A laboratory Manual” Sambrook et al., (1989); “Current Protocols in Molecular Biology” Volumes I-III Ausubel, R. M., ed. (1994); Ausubel et al., “Current Protocols in Molecular Biology”, John Wiley and Sons, Baltimore, Md. (1989); Perbal, “A Practical Guide to Molecular Cloning”, John Wiley & Sons, New York (1988) and “Oligonucleotide Synthesis” Gait, M. J., ed. (1984) utilizing solid phase chemistry, e.g. cyanoethyl phosphoramidite followed by deprotection, desalting and purification by for example, an automated trityl-on method or HPLC.

[0254] Oligonucleotides used according to this aspect of the present invention are those having a length selected from a range of about 10 to about 200 bases preferably about 15 to about 150 bases, more preferably about 20 to about 100 bases, most preferably about 20 to about 50 bases. Preferably, the oligonucleotide of the present invention features at least 17, at least 18, at least 19, at least 20, at least 22, at least 25, at least 30 or at least 40, bases specifically hybridizable with the biomarkers of the present invention.

[0255] The oligonucleotides of the present invention may comprise heterocylic nucleosides consisting of purines and the pyrimidines bases, bonded in a 3′ to 5′ phosphodiester linkage.

[0256] Preferably used oligonucleotides are those modified at one or more of the backbone, internucleoside linkages or bases, as is broadly described hereinunder.

[0257] Specific examples of preferred oligonucleotides useful according to this aspect of the present invention include oligonucleotides containing modified backbones or non-natural internucleoside linkages. Oligonucleotides having modified backbones include those that retain a phosphorus atom in the backbone, as disclosed in U.S. Pat. Nos. 4,469,863; 4,476,301; 5,023,243; 5,177,196; 5,188,897; 5,264,423; 5,276,019; 5,278,302; 5,286,717; 5,321,131; 5,399,676; 5,405,939; 5,453,496; 5,455,233; 5,466, 677; 5,476,925; 5,519,126; 5,536,821; 5,541,306; 5,550,111; 5,563,253; 5,571,799; 5,587,361; and 5,625,050.

[0258] Preferred modified oligonucleotide backbones include, for example, phosphorothioates, chiral phosphorothioates, phosphorodithioates, phosphotriesters, aminoalkyl phosphotriesters, methyl and other alkyl phosphonates including 3′-alkylene phosphonates and chiral phosphonates, phosphinates, phosphoramidates including 3′-amino phosphoramidate and aminoalkylphosphoramidates, thionophosphoramidates, thionoalkylphosphonates, thionoalkylphosphotriesters, and boranophosphates having normal 3′-5′ linkages, 2′-5′ linked analogs of these, and those having inverted polarity wherein the adjacent pairs of nucleoside units are linked 3′-5′ to 5′-3′ or 2′-5′ to 5′-2′. Various salts, mixed salts and free acid forms can also be used.

[0259] Alternatively, modified oligonucleotide backbones that do not include a phosphorus atom therein have backbones that are formed by short chain alkyl or cycloalkyl internucleoside linkages, mixed heteroatom and alkyl or cycloalkyl internucleoside linkages, or one or more short chain heteroatomic or heterocyclic internucleoside linkages. These include those having morpholino linkages (formed in part from the sugar portion of a nucleoside); siloxane backbones; sulfide, sulfoxide and sulfone backbones; formacetyl and thioformacetyl backbones; methylene formacetyl and thioformacetyl backbones; alkene containing backbones; sulfamate backbones; methyleneimino and methylenehydrazino backbones; sulfonate and sulfonamide backbones; amide backbones; and others having mixed N, O, S and CH₂ component parts, as disclosed in U.S. Pat. Nos. 5,034,506; 5,166,315; 5,185,444; 5,214,134; 5,216,141; 5,235,033; 5,264,562; 5,264,564; 5,405,938; 5,434,257; 5,466,677; 5,470,967; 5,489,677; 5,541,307; 5,561,225; 5,596,086; 5,602,240; 5,610,289; 5,602,240; 5,608,046; 5,610,289; 5,618,704; 5,623,070; 5,663,312; 5,633,360; 5,677,437; and 5,677,439.

[0260] Other oligonucleotides which can be used according to the present invention, are those modified in both sugar and the internucleoside linkage, i.e., the backbone, of the nucleotide units are replaced with novel groups. The base units are maintained for complementation with the appropriate polynucleotide target. An example for such an oligonucleotide mimetic, includes peptide nucleic acid (PNA). United States patents that teach the preparation of PNA compounds include, but are not limited to, U.S. Pat. Nos. 5,539,082; 5,714,331; and 5,719,262, each of which is herein incorporated by reference. Other backbone modifications, which can be used in the present invention are disclosed in U.S. Pat. No. 6,303,374.

[0261] Oligonucleotides of the present invention may also include base modifications or substitutions. As used herein, “unmodified” or “natural” bases include the purine bases adenine (A) and guanine (G), and the pyrimidine bases thymine (T), cytosine (C) and uracil (U). Modified bases include but are not limited to other synthetic and natural bases such as 5-methylcytosine (5-me-C), 5-hydroxymethyl cytosine, xanthine, hypoxanthine, 2-aminoadenine, 6-methyl and other alkyl derivatives of adenine and guanine, 2-propyl and other alkyl derivatives of adenine and guanine, 2-thiouracil, 2-thiothymine and 2-thiocytosine, 5-halouracil and cytosine, 5-propynyl uracil and cytosine, 6-azo uracil, cytosine and thymine, 5-uracil (pseudouracil), 4-thiouracil, 8-halo, 8-amino, 8-thiol, 8-thioalkyl, 8-hydroxyl and other 8-substituted adenines and guanines, 5-halo particularly 5-bromo, 5-trifluoromethyl and other 5-substituted uracils and cytosines, 7-methylguanine and 7-methyladenine, 8-azaguanine and 8-azaadenine, 7-deazaguanine and 7-deazaadenine and 3-deazaguanine and 3-deazaadenine. Further bases particularly useful for increasing the binding affinity of the oligomeric compounds of the invention include 5-substituted pyrimidines, 6-azapyrimidines and N-2, N-6 and O-6 substituted purines, including 2-aminopropyladenine, 5-propynyluracil and 5-propynylcytosine. 5-methylcytosine substitutions have been shown to increase nucleic acid duplex stability by 0.6-1.2° C. and are presently preferred base substitutions, even more particularly when combined with 2′-O-methoxyethyl sugar modifications.

[0262] Another modification of the oligonucleotides of the invention involves chemically linking to the oligonucleotide one or more moieties or conjugates, which enhance the activity, cellular distribution or cellular uptake of the oligonucleotide. Such moieties include but are not limited to lipid moieties such as a cholesterol moiety, cholic acid, a thioether, e.g., hexyl-S-tritylthiol, a thiocholesterol, an aliphatic chain, e.g., dodecandiol or undecyl residues, a phospholipid, e.g., di-hexadecyl-rac-glycerol or triethylammonium 1,2-di-O-hexadecyl-rac-glycero-3-H-phosphonate, a polyamine or a polyethylene glycol chain, or adamantane acetic acid, a palmityl moiety, or an octadecylamine or hexylamino-carbonyl-oxycholesterol moiety, as disclosed in U.S. Pat. No. 6,303,374.

[0263] It is not necessary for all positions in a given oligonucleotide molecule to be uniformly modified, and in fact more than one of the aforementioned modifications may be incorporated in a single compound or even at a single nucleoside within an oligonucleotide.

[0264] It will be appreciated that oligonucleotides of the present invention may include further modifications for more efficient use as diagnostic agents and/or to increase bioavailability, therapeutic efficacy and reduce cytotoxicity.

[0265] To enable cellular expression of the polynucleotides of the present invention, a nucleic acid construct according to the present invention may be used, which includes at least a coding region of one of the above nucleic acid sequences, and further includes at least one cis acting regulatory element. As used herein, the phrase “cis acting regulatory element” refers to a polynucleotide sequence, preferably a promoter, which binds a trans acting regulator and regulates the transcription of a coding sequence located downstream thereto.

[0266] Any suitable promoter sequence can be used by the nucleic acid construct of the present invention.

[0267] Preferably, the promoter utilized by the nucleic acid construct of the present invention is active in the specific cell population transformed. Examples of cell type-specific and/or tissue-specific promoters include promoters such as albumin that is liver specific, lymphoid specific promoters [Calame et al., (1988) Adv. Immunol. 43:235-275]; in particular promoters of T-cell receptors [Winoto et al., (1989) EMBO J. 8:729-733] and immunoglobulins; [Baneiji et al. (1983) Cell 33729-740], neuron-specific promoters such as the neurofilament promoter [Byrne et al. (1989) Proc. Natl. Acad. Sci. USA 86:5473-5477], pancreas-specific promoters [Edlunch et al. (1985) Science 230:912-916] or mammary gland-specific promoters such as the milk whey promoter (U.S. Pat. No. 4,873,316 and European Application Publication No. 264,166). The nucleic acid construct of the present invention can further include an enhancer, which can be adjacent or distant to the promoter sequence and can function in up regulating the transcription therefrom.

[0268] The nucleic acid construct of the present invention preferably further includes an appropriate selectable marker and/or an origin of replication. Preferably, the nucleic acid construct utilized is a shuttle vector, which can propagate both in E. coli (wherein the construct comprises an appropriate selectable marker and origin of replication) and be compatible for propagation in cells, or integration in a gene and a tissue of choice. The construct according to the present invention can be, for example, a plasmid, a bacmid, a phagemid, a cosmid, a phage, a virus or an artificial chromosome.

[0269] Examples of suitable constructs include, but are not limited to, pcDNA3, pcDNA3.1 (+/−), pGL3, PzeoSV2 (+/−), pDisplay, pEF/myc/cyto, pCMV/myc/cyto each of which is commercially available from Invitrogen Co. (www.invitrogen.com). Examples of retroviral vector and packaging systems are those sold by Clontech, San Diego, Calif., including Retro-X vectors pLNCX and pLXSN, which permit cloning into multiple cloning sites and the trasgene is transcribed from CMV promoter. Vectors derived from Mo-MuLV are also included such as pBabe, where the transgene will be transcribed from the 5′LTR promoter.

[0270] Currently preferred in vivo nucleic acid transfer techniques include transfection with viral or non-viral constructs, such as adenovirus, lentivirus, Herpes simplex I virus, or adeno-associated virus (AAV) and lipid-based systems. Useful lipids for lipid-mediated transfer of the gene are, for example, DOTMA, DOPE, and DC-Chol [Tonkinson et al., Cancer Investigation, 14(1): 54-65 (1996)]. The most preferred constructs for use in gene therapy are viruses, most preferably adenoviruses, AAV, lentiviruses, or retroviruses. A viral construct such as a retroviral construct includes at least one transcriptional promoter/enhancer or locus-defining element(s), or other elements that control gene expression by other means such as alternate splicing, nuclear RNA export, or post-translational modification of messenger. Such vector constructs also include a packaging signal, long terminal repeats (LTRs) or portions thereof, and positive and negative strand primer binding sites appropriate to the virus used, unless it is already present in the viral construct. In addition, such a construct typically includes a signal sequence for secretion of the peptide from a host cell in which it is placed. Preferably the signal sequence for this purpose is a mammalian signal sequence or the signal sequence of the polypeptide variants of the present invention. Optionally, the construct may also include a signal that directs polyadenylation, as well as one or more restriction sites and a translation termination sequence. By way of example, such constructs will typically include a 5′ LTR, a tRNA binding site, a packaging signal, an origin of second-strand DNA synthesis, and a 3′ LTR or a portion thereof. Other vectors can be used that are non-viral, such as cationic lipids, polylysine, and dendrimers.

Hybridization Assays

[0271] Detection of a nucleic acid of interest in a biological sample may optionally be effected by hybridization-based assays using an oligonucleotide probe (non-limiting examples of probes according to the present invention were previously described).

[0272] Traditional hybridization assays include PCR, RT-PCR, Real-time PCR, RNase protection, in-situ hybridization, primer extension, Southern blots (DNA detection), dot or slot blots (DNA, RNA), and Northern blots (RNA detection) (NAT type assays are described in greater detail below). More recently, PNAs have been described (Nielsen et al. 1999, Current Opin. Biotechnol. 10:71-75). Other detection methods include kits containing probes on a dipstick setup and the like.

[0273] Hybridization based assays which allow the detection of a variant of interest (i.e., DNA or RNA) in a biological sample rely on the use of oligonucleotides which can be 10, 15, 20, or 30 to 100 nucleotides long preferably from 10 to 50, more preferably from 40 to 50 nucleotides long.

[0274] Thus, the isolated polynucleotides (oligonucleotides) of the present invention are preferably hybridizable with any of the herein described nucleic acid sequences under moderate to stringent hybridization conditions.

[0275] Moderate to stringent hybridization conditions are characterized by a hybridization solution such as containing 10% dextrane sulfate, 1 M NaCl, 1% SDS and 5×10⁶ cpm ³²P labeled probe, at 65° C., with a final wash solution of 0.2×SSC and 0.1% SDS and final wash at 65° C. and whereas moderate hybridization is effected using a hybridization solution containing 10% dextrane sulfate, 1 M NaCl, 1% SDS and 5×10⁶ cpm ³²P labeled probe, at 65° C., with a final wash solution of 1×SSC and 0.1% SDS and final wash at 50° C.

[0276] More generally, hybridization of short nucleic acids (below 200 bp in length, e.g. 17-40 bp in length) can be effected using the following exemplary hybridization protocols which can be modified according to the desired stringency; (i) Hybridization solution of 6×SSC and 1% SDS or 3 M TMACI, 0.01 M sodium phosphate (pH 6.8), 1 mM EDTA (pH 7.6), 0.5% SDS, 100 μg/ml denatured salmon sperm DNA and 0.1% nonfat dried milk, hybridization temperature of 1-1.5° C. below the Tₘ, final wash solution of 3 M TMACI, 0.01 M sodium phosphate (pH 6.8), 1 mM EDTA (pH 7.6), 0.5% SDS at 1-1.5° C. below the Tₘ; (ii) Hybridization solution of 6×SSC and 0.1% SDS or 3 M TMACI, 0.01 M sodium phosphate (pH 6.8), 1 mM EDTA (pH 7.6), 0.5% SDS, 100 μg/ml denatured salmon sperm DNA and 0.1% nonfat dried milk, hybridization temperature of 2-2.5° C. below the Tₘ, final wash solution of 3 M TMACI, 0.01 M sodium phosphate (pH 6.8), 1 mM EDTA (pH 7.6), 0.5% SDS at 1-1.5° C. below the Tₘ, final wash solution of 6×SSC, and final wash at 22° C.; (iii) Hybridization solution of 6×SSC and 1% SDS or 3 M TMACI, 0.01 M sodium phosphate (pH 6.8), 1 mM EDTA (pH 7.6), 0.5% SDS, 100 μg/ml denatured salmon sperm DNA and 0.1% nonfat dried milk, hybridization temperature.

[0277] The detection of hybrid duplexes can be carried out by a number of methods. Typically, hybridization duplexes are separated from unhybridized nucleic acids and the labels bound to the duplexes are then detected. Such labels refer to radioactive, fluorescent, biological or enzymatic tags or labels of standard use in the art. A label can be conjugated to either the oligonucleotide probes or the nucleic acids derived from the biological sample.

[0278] Probes can be labeled according to numerous well known methods. Non-limiting examples of radioactive labels include 3H, 14C, 32P, and 35S. Non-limiting examples of detectable markers include ligands, fluorophores, chemiluminescent agents, enzymes, and antibodies. Other detectable markers for use with probes, which can enable an increase in sensitivity of the method of the invention, include biotin and radio-nucleotides. It will become evident to the person of ordinary skill that the choice of a particular label dictates the manner in which it is bound to the probe.

[0279] For example, oligonucleotides of the present invention can be labeled subsequent to synthesis, by incorporating biotinylated dNTPs or rNTP, or some similar means (e.g., photo-cross-linking a psoralen derivative of biotin to RNAs), followed by addition of labeled streptavidin (e.g., phycoerythrin-conjugated streptavidin) or the equivalent. Alternatively, when fluorescently-labeled oligonucleotide probes are used, fluorescein, lissamine, phycoerythrin, rhodamine (Perkin Elmer Cetus), Cy2, Cy3, Cy3.5, Cy5, Cy5.5, Cy7, Fluor X (Amersham) and others [e.g., Kricka et al. (1992), Academic Press San Diego, Calif.] can be attached to the oligonucleotides.

[0280] Those skilled in the art will appreciate that wash steps may be employed to wash away excess target DNA or probe as well as unbound conjugate. Further, standard heterogeneous assay formats are suitable for detecting the hybrids using the labels present on the oligonucleotide primers and probes.

[0281] It will be appreciated that a variety of controls may be usefully employed to improve accuracy of hybridization assays. For instance, samples may be hybridized to an irrelevant probe and treated with RNAse A prior to hybridization, to assess false hybridization.

[0282] Although the present invention is not specifically dependent on the use of a label for the detection of a particular nucleic acid sequence, such a label might be beneficial, by increasing the sensitivity of the detection. Furthermore, it enables automation. Probes can be labeled according to numerous well known methods.

[0283] As commonly known, radioactive nucleotides can be incorporated into probes of the invention by several methods. Non-limiting examples of radioactive labels include ³H, ¹⁴C, ³²P, and ³⁵S.

[0284] Those skilled in the art will appreciate that wash steps may be employed to wash away excess target DNA or probe as well as unbound conjugate. Further, standard heterogeneous assay formats are suitable for detecting the hybrids using the labels present on the oligonucleotide primers and probes.

[0285] It will be appreciated that a variety of controls may be usefully employed to improve accuracy of hybridization assays.

[0286] Probes of the invention can be utilized with naturally occurring sugar-phosphate backbones as well as modified backbones including phosphorothioates, dithionates, alkyl phosphonates and a-nucleotides and the like. Probes of the invention can be constructed of either ribonucleic acid (RNA) or deoxyribonucleic acid (DNA), and preferably of DNA.

NAT Assays

[0287] Detection of a nucleic acid of interest in a biological sample may also optionally be effected by NAT-based assays, which involve nucleic acid amplification technology, such as PCR for example (or variations thereof such as real-time PCR for example).

[0288] As used herein, a “primer” defines an oligonucleotide which is capable of annealing to (hybridizing with) a target sequence, thereby creating a double stranded region which can serve as an initiation point for DNA synthesis under suitable conditions.

[0289] Amplification of a selected, or target, nucleic acid sequence may be carried out by a number of suitable methods. See generally Kwoh et al., 1990, Am. Biotechnol. Lab. 8:14 Numerous amplification techniques have been described and can be readily adapted to suit particular needs of a person of ordinary skill. Non-limiting examples of amplification techniques include polymerase chain reaction (PCR), ligase chain reaction (LCR), strand displacement amplification (SDA), transcription-based amplification, the q3 replicase system and NASBA (Kwoh et al., 1989, Proc. NatI. Acad. Sci. USA 86, 1173-1177; Lizardi et al., 1988, BioTechnology 6:1197-1202; Malek et al., 1994, Methods Mol. Biol., 28:253-260; and Sambrook et al., 1989, supra).

[0290] The terminology “amplification pair” (or “primer pair”) refers herein to a pair of oligonucleotides (oligos) of the present invention, which are selected to be used together in amplifying a selected nucleic acid sequence by one of a number of types of amplification processes, preferably a polymerase chain reaction. Other types of amplification processes include ligase chain reaction, strand displacement amplification, or nucleic acid sequence-based amplification, as explained in greater detail below. As commonly known in the art, the oligos are designed to bind to a complementary sequence under selected conditions.

[0291] In one particular embodiment, amplification of a nucleic acid sample from a patient is amplified under conditions which favor the amplification of the most abundant differentially expressed nucleic acid. In one preferred embodiment, RT-PCR is carried out on an mRNA sample from a patient under conditions which favor the amplification of the most abundant mRNA. In another preferred embodiment, the amplification of the differentially expressed nucleic acids is carried out simultaneously. It will be realized by a person skilled in the art that such methods could be adapted for the detection of differentially expressed proteins instead of differentially expressed nucleic acid sequences.

[0292] The nucleic acid (i.e. DNA or RNA) for practicing the present invention may be obtained according to well known methods.

[0293] Oligonucleotide primers of the present invention may be of any suitable length, depending on the particular assay format and the particular needs and targeted genomes employed. Optionally, the oligonucleotide primers are at least 12 nucleotides in length, preferably between 15 and 24 molecules, and they may be adapted to be especially suited to a chosen nucleic acid amplification system. As commonly known in the art, the oligonucleotide primers can be designed by taking into consideration the melting point of hybridization thereof with its targeted sequence (Sambrook et al., 1989, Molecular Cloning—A Laboratory Manual, 2nd Edition, CSH Laboratories; Ausubel et al., 1989, in Current Protocols in Molecular Biology, John Wiley & Sons Inc., N.Y.).

[0294] It will be appreciated that antisense oligonucleotides may be employed to quantify expression of a splice isoform of interest. Such detection is effected at the pre-mRNA level. Essentially the ability to quantitate transcription from a splice site of interest can be effected based on splice site accessibility. Oligonucleotides may compete with splicing factors for the splice site sequences. Thus, low activity of the antisense oligonucleotide is indicative of splicing activity.

[0295] The polymerase chain reaction and other nucleic acid amplification reactions are well known in the art (various non-limiting examples of these reactions are described in greater detail below). The pair of oligonucleotides according to this aspect of the present invention are preferably selected to have compatible melting temperatures (Tm), e.g., melting temperatures which differ by less than that 7° C., preferably less than 5° C., more preferably less than 4° C., most preferably less than 3° C., ideally between 3° C. and 0° C.

[0296] Polymerase Chain Reaction (PCR): The polymerase chain reaction (PCR), as described in U.S. Pat. Nos. 4,683,195 and 4,683,202 to Mullis and Mullis et al., is a method of increasing the concentration of a segment of target sequence in a mixture of genomic DNA without cloning or purification. This technology provides one approach to the problems of low target sequence concentration. PCR can be used to directly increase the concentration of the target to an easily detectable level. This process for amplifying the target sequence involves the introduction of a molar excess of two oligonucleotide primers which are complementary to their respective strands of the double-stranded target sequence to the DNA mixture containing the desired target sequence. The mixture is denatured and then allowed to hybridize. Following hybridization, the primers are extended with polymerase so as to form complementary strands. The steps of denaturation, hybridization (annealing), and polymerase extension (elongation) can be repeated as often as needed, in order to obtain relatively high concentrations of a segment of the desired target sequence.

[0297] The length of the segment of the desired target sequence is determined by the relative positions of the primers with respect to each other, and, therefore, this length is a controllable parameter. Because the desired segments of the target sequence become the dominant sequences (in terms of concentration) in the mixture, they are said to be “PCR-amplified.”

[0298] Ligase Chain Reaction (LCR or LAR): The ligase chain reaction [LCR; sometimes referred to as “Ligase Amplification Reaction” (LAR)] has developed into a well-recognized alternative method of amplifying nucleic acids. In LCR, four oligonucleotides, two adjacent oligonucleotides which uniquely hybridize to one strand of target DNA, and a complementary set of adjacent oligonucleotides, which hybridize to the opposite strand are mixed and DNA ligase is added to the mixture. Provided that there is complete complementarity at the junction, ligase will covalently link each set of hybridized molecules. Importantly, in LCR, two probes are ligated together only when they base-pair with sequences in the target sample, without gaps or mismatches. Repeated cycles of denaturation, and ligation amplify a short segment of DNA. LCR has also been used in combination with PCR to achieve enhanced detection of single-base changes: see for example Segev, PCT Publication No. W09001069 A1 (1990). However, because the four oligonucleotides used in this assay can pair to form two short ligatable fragments, there is the potential for the generation of target-independent background signal. The use of LCR for mutant screening is limited to the examination of specific nucleic acid positions.

[0299] Self-Sustained Synthetic Reaction (3SR/NASBA): The self-sustained sequence replication reaction (3SR) is a transcription-based in vitro amplification system that can exponentially amplify RNA sequences at a uniform temperature. The amplified RNA can then be utilized for mutation detection. In this method, an oligonucleotide primer is used to add a phage RNA polymerase promoter to the 5′ end of the sequence of interest. In a cocktail of enzymes and substrates that includes a second primer, reverse transcriptase, RNase H, RNA polymerase and ribo- and deoxyribonucleoside triphosphates, the target sequence undergoes repeated rounds of transcription, cDNA synthesis and second-strand synthesis to amplify the area of interest. The use of 3SR to detect mutations is kinetically limited to screening small segments of DNA (e.g., 200-300 base pairs).

[0300] Q-Beta (Qβ) Replicase: In this method, a probe which recognizes the sequence of interest is attached to the replicatable RNA template for Qβ replicase. A previously identified major problem with false positives resulting from the replication of unhybridized probes has been addressed through use of a sequence-specific ligation step. However, available thermostable DNA ligases are not effective on this RNA substrate, so the ligation must be performed by T4 DNA ligase at low temperatures (37 degrees C.). This prevents the use of high temperature as a means of achieving specificity as in the LCR, the ligation event can be used to detect a mutation at the junction site, but not elsewhere.

[0301] A successful diagnostic method must be very specific. A straight-forward method of controlling the specificity of nucleic acid hybridization is by controlling the temperature of the reaction. While the 3SR/NASBA, and Qβ systems are all able to generate a large quantity of signal, one or more of the enzymes involved in each cannot be used at high temperature (i.e., >55 degrees C.). Therefore the reaction temperatures cannot be raised to prevent non-specific hybridization of the probes. If probes are shortened in order to make them melt more easily at low temperatures, the likelihood of having more than one perfect match in a complex genome increases. For these reasons, PCR and LCR currently dominate the research field in detection technologies.

[0302] The basis of the amplification procedure in the PCR and LCR is the fact that the products of one cycle become usable templates in all subsequent cycles, consequently doubling the population with each cycle. The final yield of any such doubling system can be expressed as: (1+X)ⁿ=y, where “X” is the mean efficiency (percent copied in each cycle), “n” is the number of cycles, and “y” is the overall efficiency, or yield of the reaction. If every copy of a target DNA is utilized as a template in every cycle of a polymerase chain reaction, then the mean efficiency is 100%. If 20 cycles of PCR are performed, then the yield will be 2²⁰, or 1,048,576 copies of the starting material. If the reaction conditions reduce the mean efficiency to 85%, then the yield in those 20 cycles will be only 1.85²⁰, or 220,513 copies of the starting material. In other words, a PCR running at 85% efficiency will yield only 21% as much final product, compared to a reaction running at 100% efficiency. A reaction that is reduced to 50% mean efficiency will yield less than 1% of the possible product.

[0303] In practice, routine polymerase chain reactions rarely achieve the theoretical maximum yield, and PCRs are usually run for more than 20 cycles to compensate for the lower yield. At 50% mean efficiency, it would take 34 cycles to achieve the million-fold amplification theoretically possible in 20, and at lower efficiencies, the number of cycles required becomes prohibitive. In addition, any background products that amplify with a better mean efficiency than the intended target will become the dominant products.

[0304] Also, many variables can influence the mean efficiency of PCR, including target DNA length and secondary structure, primer length and design, primer and dNTP concentrations, and buffer composition, to name but a few. Contamination of the reaction with exogenous DNA (e.g., DNA spilled onto lab surfaces) or cross-contamination is also a major consideration. Reaction conditions must be carefully optimized for each different primer pair and target sequence, and the process can take days, even for an experienced investigator. The laboriousness of this process, including numerous technical considerations and other factors, presents a significant drawback to using PCR in the clinical setting. Indeed, PCR has yet to penetrate the clinical market in a significant way. The same concerns arise with LCR, as LCR must also be optimized to use different oligonucleotide sequences for each target sequence. In addition, both methods require expensive equipment, capable of precise temperature cycling.

[0305] Many applications of nucleic acid detection technologies, such as in studies of allelic variation, involve not only detection of a specific sequence in a complex background, but also the discrimination between sequences with few, or single, nucleotide differences. One method of the detection of allele-specific variants by PCR is based upon the fact that it is difficult for Taq polymerase to synthesize a DNA strand when there is a mismatch between the template strand and the 3′ end of the primer. An allele-specific variant may be detected by the use of a primer that is perfectly matched with only one of the possible alleles; the mismatch to the other allele acts to prevent the extension of the primer, thereby preventing the amplification of that sequence. This method has a substantial limitation in that the base composition of the mismatch influences the ability to prevent extension across the mismatch, and certain mismatches do not prevent extension or have only a minimal effect.

[0306] A similar 3′-mismatch strategy is used with greater effect to prevent ligation in the LCR. Any mismatch effectively blocks the action of the thermostable ligase, but LCR still has the drawback of target-independent background ligation products initiating the amplification. Moreover, the combination of PCR with subsequent LCR to identify the nucleotides at individual positions is also a clearly cumbersome proposition for the clinical laboratory.

[0307] The direct detection method according to various preferred embodiments of the present invention may be, for example a cycling probe reaction (CPR) or a branched DNA analysis.

[0308] When a sufficient amount of a nucleic acid to be detected is available, there are advantages to detecting that sequence directly, instead of making more copies of that target, (e.g., as in PCR and LCR). Most notably, a method that does not amplify the signal exponentially is more amenable to quantitative analysis. Even if the signal is enhanced by attaching multiple dyes to a single oligonucleotide, the correlation between the final signal intensity and amount of target is direct. Such a system has an additional advantage that the products of the reaction will not themselves promote further reaction, so contamination of lab surfaces by the products is not as much of a concern. Recently devised techniques have sought to eliminate the use of radioactivity and/or improve the sensitivity in automatable formats. Two examples are the “Cycling Probe Reaction” (CPR), and “Branched DNA” (bDNA).

[0309] Cycling probe reaction (CPR): The cycling probe reaction (CPR), uses a long chimeric oligonucleotide in which a central portion is made of RNA while the two termini are made of DNA. Hybridization of the probe to a target DNA and exposure to a thermostable RNase H causes the RNA portion to be digested. This destabilizes the remaining DNA portions of the duplex, releasing the remainder of the probe from the target DNA and allowing another probe molecule to repeat the process. The signal, in the form of cleaved probe molecules, accumulates at a linear rate. While the repeating process increases the signal, the RNA portion of the oligonucleotide is vulnerable to RNases that may carried through sample preparation.

[0310] Branched DNA: Branched DNA (bDNA), involves oligonucleotides with branched structures that allow each individual oligonucleotide to carry 35 to 40 labels (e.g., alkaline phosphatase enzymes). While this enhances the signal from a hybridization event, signal from non-specific binding is similarly increased.

[0311] The detection of at least one sequence change according to various preferred embodiments of the present invention may be accomplished by, for example restriction fragment length polymorphism (RFLP analysis), allele specific oligonucleotide (ASO) analysis, Denaturing/Temperature Gradient Gel Electrophoresis (DGGE/TGGE), Single-Strand Conformation Polymorphism (SSCP) analysis or Dideoxy fingerprinting (ddF).

[0312] The demand for tests which allow the detection of specific nucleic acid sequences and sequence changes is growing rapidly in clinical diagnostics. As nucleic acid sequence data for genes from humans and pathogenic organisms accumulates, the demand for fast, cost-effective, and easy-to-use tests for as yet mutations within specific sequences is rapidly increasing.

[0313] A handful of methods have been devised to scan nucleic acid segments for mutations. One option is to determine the entire gene sequence of each test sample (e.g., a bacterial isolate). For sequences under approximately 600 nucleotides, this may be accomplished using amplified material (e.g., PCR reaction products). This avoids the time and expense associated with cloning the segment of interest. However, specialized equipment and highly trained personnel are required, and the method is too labor-intense and expensive to be practical and effective in the clinical setting.

[0314] In view of the difficulties associated with sequencing, a given segment of nucleic acid may be characterized on several other levels. At the lowest resolution, the size of the molecule can be determined by electrophoresis by comparison to a known standard run on the same gel. A more detailed picture of the molecule may be achieved by cleavage with combinations of restriction enzymes prior to electrophoresis, to allow construction of an ordered map. The presence of specific sequences within the fragment can be detected by hybridization of a labeled probe, or the precise nucleotide sequence can be determined by partial chemical degradation or by primer extension in the presence of chain-terminating nucleotide analogs.

[0315] Restriction fragment length polymorphism (RFLP): For detection of single-base differences between like sequences, the requirements of the analysis are often at the highest level of resolution. For cases in which the position of the nucleotide in question is known in advance, several methods have been developed for examining single base changes without direct sequencing. For example, if a mutation of interest happens to fall within a restriction recognition sequence, a change in the pattern of digestion can be used as a diagnostic tool (e.g., restriction fragment length polymorphism [RFLP] analysis).

[0316] Single point mutations have been also detected by the creation or destruction of RFLPs. Mutations are detected and localized by the presence and size of the RNA fragments generated by cleavage at the mismatches. Single nucleotide mismatches in DNA heteroduplexes are also recognized and cleaved by some chemicals, providing an alternative strategy to detect single base substitutions, generically named the “Mismatch Chemical Cleavage” (MCC). However, this method requires the use of osmium tetroxide and piperidine, two highly noxious chemicals which are not suited for use in a clinical laboratory.

[0317] RFLP analysis suffers from low sensitivity and requires a large amount of sample. When RFLP analysis is used for the detection of point mutations, it is, by its nature, limited to the detection of only those single base changes which fall within a restriction sequence of a known restriction endonuclease. Moreover, the majority of the available enzymes have 4 to 6 base-pair recognition sequences, and cleave too frequently for many large-scale DNA manipulations. Thus, it is applicable only in a small fraction of cases, as most mutations do not fall within such sites.

[0318] A handful of rare-cutting restriction enzymes with 8 base-pair specificities have been isolated and these are widely used in genetic mapping, but these enzymes are few in number, are limited to the recognition of G+C-rich sequences, and cleave at sites that tend to be highly clustered. Recently, endonucleases encoded by group I introns have been discovered that might have greater than 12 base-pair specificity, but again, these are few in number.

[0319] Allele specific oligonucleotide (ASO): If the change is not in a recognition sequence, then allele-specific oligonucleotides (ASOs), can be designed to hybridize in proximity to the mutated nucleotide, such that a primer extension or ligation event can bused as the indicator of a match or a mis-match. Hybridization with radioactively labeled allelic specific oligonucleotides (ASO) also has been applied to the detection of specific point mutations. The method is based on the differences in the melting temperature of short DNA fragments differing by a single nucleotide. Stringent hybridization and washing conditions can differentiate between mutant and wild-type alleles. The ASO approach applied to PCR products also has been extensively utilized by various researchers to detect and characterize point mutations in ras genes and gsp/gip oncogenes. Because of the presence of various nucleotide changes in multiple positions, the ASO method requires the use of many oligonucleotides to cover all possible oncogenic mutations.

[0320] With either of the techniques described above (i.e., RFLP and ASO), the precise location of the suspected mutation must be known in advance of the test. That is to say, they are inapplicable when one needs to detect the presence of a mutation within a gene or sequence of interest.

[0321] Denaturing/Temperature Gradient Gel Electrophoresis (DGGE/TGGE): Two other methods rely on detecting changes in electrophoretic mobility in response to minor sequence changes. One of these methods, termed “Denaturing Gradient Gel Electrophoresis” (DGGE) is based on the observation that slightly different sequences will display different patterns of local melting when electrophoretically resolved on a gradient gel. In this manner, variants can be distinguished, as differences in melting properties of homoduplexes versus heteroduplexes differing in a single nucleotide can detect the presence of mutations in the target sequences because of the corresponding changes in their electrophoretic mobilities. The fragments to be analyzed, usually PCR products, are “clamped” at one end by a long stretch of G-C base pairs (30-80) to allow complete denaturation of the sequence of interest without complete dissociation of the strands. The attachment of a GC “clamp” to the DNA fragments increases the fraction of mutations that can be recognized by DGGE. Attaching a GC clamp to one primer is critical to ensure that the amplified sequence has a low dissociation temperature. Modifications of the technique have been developed, using temperature gradients, and the method can be also applied to RNA:RNA duplexes.

[0322] Limitations on the utility of DGGE include the requirement that the denaturing conditions must be optimized for each type of DNA to be tested. Furthermore, the method requires specialized equipment to prepare the gels and maintain the needed high temperatures during electrophoresis. The expense associated with the synthesis of the clamping tail on one oligonucleotide for each sequence to be tested is also a major consideration. In addition, long running times are required for DGGE. The long running time of DGGE was shortened in a modification of DGGE called constant denaturant gel electrophoresis (CDGE). CDGE requires that gels be performed under different denaturant conditions in order to reach high efficiency for the detection of mutations.

[0323] A technique analogous to DGGE, termed temperature gradient gel electrophoresis (TGGE), uses a thermal gradient rather than a chemical denaturant gradient. TGGE requires the use of specialized equipment which can generate a temperature gradient perpendicularly oriented relative to the electrical field. TGGE can detect mutations in relatively small fragments of DNA therefore scanning of large gene segments requires the use of multiple PCR products prior to running the gel.

[0324] Single-Strand Conformation Polymorphism (SSCP): Another common method, called “Single-Strand Conformation Polymorphism” (SSCP) was developed by Hayashi, Sekya and colleagues and is based on the observation that single strands of nucleic acid can take on characteristic conformations in non-denaturing conditions, and these conformations influence electrophoretic mobility. The complementary strands assume sufficiently different structures that one strand may be resolved from the other. Changes in sequences within the fragment will also change the conformation, consequently altering the mobility and allowing this to be used as an assay for sequence variations.

[0325] The SSCP process involves denaturing a DNA segment (e.g., a PCR product) that is labeled on both strands, followed by slow electrophoretic separation on a non-denaturing polyacrylamide gel, so that intra-molecular interactions can form and not be disturbed during the run. This technique is extremely sensitive to variations in gel composition and temperature. A serious limitation of this method is the relative difficulty encountered in comparing data generated in different laboratories, under apparently similar conditions.

[0326] Dideoxy fingerprinting (ddF): The dideoxy fingerprinting (ddF) is another technique developed to scan genes for the presence of mutations. The ddF technique combines components of Sanger dideoxy sequencing with SSCP. A dideoxy sequencing reaction is performed using one dideoxy terminator and then the reaction products are electrophoresed on nondenaturing polyacrylamide gels to detect alterations in mobility of the termination segments as in SSCP analysis. While ddF is an improvement over SSCP in terms of increased sensitivity, ddF requires the use of expensive dideoxynucleotides and this technique is still limited to the analysis of fragments of the size suitable for SSCP (i.e., fragments of 200-300 bases for optimal detection of mutations).

[0327] In addition to the above limitations, all of these methods are limited as to the size of the nucleic acid fragment that can be analyzed. For the direct sequencing approach, sequences of greater than 600 base pairs require cloning, with the consequent delays and expense of either deletion sub-cloning or primer walking, in order to cover the entire fragment. SSCP and DGGE have even more severe size limitations. Because of reduced sensitivity to sequence changes, these methods are not considered suitable for larger fragments. Although SSCP is reportedly able to detect 90% of single-base substitutions within a 200 base-pair fragment, the detection drops to less than 50% for 400 base pair fragments. Similarly, the sensitivity of DGGE decreases as the length of the fragment reaches 500 base-pairs. The ddF technique, as a combination of direct sequencing and SSCP, is also limited by the relatively small size of the DNA that can be screened.

[0328] According to a presently preferred embodiment of the present invention the step of searching for any of the nucleic acid sequences described here, in tumor cells or in cells derived from a cancer patient is effected by any suitable technique, including, but not limited to, nucleic acid sequencing, polymerase chain reaction, ligase chain reaction, self-sustained synthetic reaction, Qβ-Replicase, cycling probe reaction, branched DNA, restriction fragment length polymorphism analysis, mismatch chemical cleavage, heteroduplex analysis, allele-specific oligonucleotides, denaturing gradient gel electrophoresis, constant denaturant gel electrophoresis, temperature gradient gel electrophoresis and dideoxy fingerprinting.

[0329] Detection may also optionally be performed with a chip or other such device. The nucleic acid sample which includes the candidate region to be analyzed is preferably isolated, amplified and labeled with a reporter group. This reporter group can be a fluorescent group such as phycoerythrin. The labeled nucleic acid is then incubated with the probes immobilized on the chip using a fluidics station describe the fabrication of fluidics devices and particularly microcapillary devices, in silicon and glass substrates.

[0330] Once the reaction is completed, the chip is inserted into a scanner and patterns of hybridization are detected. The hybridization data is collected, as a signal emitted from the reporter groups already incorporated into the nucleic acid, which is now bound to the probes attached to the chip. Since the sequence and position of each probe immobilized on the chip is known, the identity of the nucleic acid hybridized to a given probe can be determined.

[0331] It will be appreciated that when utilized along with automated equipment, the above described detection methods can be used to screen multiple samples for a disease and/or pathological condition both rapidly and easily.

Amino Acid Sequences and Peptides

[0332] The terms “polypeptide,” “peptide” and “protein” are used interchangeably herein to refer to a polymer of amino acid residues. The terms apply to amino acid polymers in which one or more amino acid residue is an analog or mimetic of a corresponding naturally occurring amino acid, as well as to naturally occurring amino acid polymers. Polypeptides can be modified, e.g., by the addition of carbohydrate residues to form glycoproteins. The terms “polypeptide,” “peptide” and “protein” include glycoproteins, as well as non-glycoproteins.

[0333] Polypeptide products can be biochemically synthesized such as by employing standard solid phase techniques. Such methods include but are not limited to exclusive solid phase synthesis, partial solid phase synthesis methods, fragment condensation, classical solution synthesis. These methods are preferably used when the peptide is relatively short (i.e., 10 kDa) and/or when it cannot be produced by recombinant techniques (i.e., not encoded by a nucleic acid sequence) and therefore involves different chemistry.

[0334] Solid phase polypeptide synthesis procedures are well known in the art and further described by John Morrow Stewart and Janis Dillaha Young, Solid Phase Peptide Syntheses (2nd Ed., Pierce Chemical Company, 1984).

[0335] Synthetic polypeptides can optionally be purified by preparative high performance liquid chromatography [Creighton T. (1983) Proteins, structures and molecular principles. WH Freeman and Co. N.Y.], after which their composition can be confirmed via amino acid sequencing.

[0336] In cases where large amounts of a polypeptide are desired, it can be generated using recombinant techniques such as described by Bitter et al., (1987) Methods in Enzymol. 153:516-544, Studier et al. (1990) Methods in Enzymol. 185:60-89, Brisson et al. (1984) Nature 310:511-514, Takamatsu et al. (1987) EMBO J. 6:307-311, Coruzzi et al. (1984) EMBO J. 3:1671-1680 and Brogli et al., (1984) Science 224:838-843, Gurley et al. (1986) Mol. Cell. Biol. 6:559-565 and Weissbach & Weissbach, 1988, Methods for Plant Molecular Biology, Academic Press, NY, Section VIII, pp 421-463.

[0337] The present invention also encompasses polypeptides encoded by the polynucleotide sequences of the present invention, as well as polypeptides according to the amino acid sequences described herein. The present invention also encompasses homologues of these polypeptides, such homologues can be at least 50%, at least 55%, at least 60%, at least 65%, at least 70%, at least 75%, at least 80%, at least 85%, at least 95% or more say 100% homologous to the amino acid sequences set forth below, as can be determined using BlastP software of the National Center of Biotechnology Information (NCBI) using default parameters, optionally and preferably including the following: filtering on (this option filters repetitive or low-complexity sequences from the query using the Seg (protein) program), scoring matrix is BLOSUM62 for proteins, word size is 3, E value is 10, gap costs are 11, 1 (initialization and extension), and number of alignments shown is 50. Finally, the present invention also encompasses fragments of the above described polypeptides and polypeptides having mutations, such as deletions, insertions or substitutions of one or more amino acids, either naturally occurring or artificially induced, either randomly or in a targeted fashion. Similarly, homology (identity) for nucleic acid sequences is given herein as determined by BlastN software of the National Center of Biotechnology Information (NCBI) using default parameters, which preferably include using the DUST filter program, and also preferably include having an E value of 10, filtering low complexity sequences and a word size of 11.

[0338] It will be appreciated that peptides identified according the present invention may be degradation products, synthetic peptides or recombinant peptides as well as peptidomimetics, typically, synthetic peptides and peptoids and semipeptoids which are peptide analogs, which may have, for example, modifications rendering the peptides more stable while in a body or more capable of penetrating into cells. Such modifications include, but are not limited to N terminus modification, C terminus modification, peptide bond modification, including, but not limited to, CH2-NH, CH2-S, CH2-S═O, O═C—NH, CH2-O, CH2-CH2, S═C—NH, CH═CH or CF═CH, backbone modifications, and residue modification. Methods for preparing peptidomimetic compounds are well known in the art and are specified. Further details in this respect are provided hereinunder.

[0339] Peptide bonds (—CO—NH—) within the peptide may be substituted, for example, by N-methylated bonds (—N(CH3)-CO—), ester bonds (—C(R)H—C—O—O—C(R)—N—), ketomethylen bonds (—CO—CH2-), α-aza bonds (—NH—N(R)—CO—), wherein R is any alkyl, e.g., methyl, carba bonds (—CH2-NH—), hydroxyethylene bonds (—CH(OH)—CH2-), thioamide bonds (—CS—NH—), olefinic double bonds (—CH═CH—), retro amide bonds (—NH—CO—), peptide derivatives (—N(R)—CH2-CO—), wherein R is the “normal” side chain, naturally presented on the carbon atom.

[0340] These modifications can occur at any of the bonds along the peptide chain and even at several (2-3) at the same time.

[0341] Natural aromatic amino acids, Trp, Tyr and Phe, may be substituted for synthetic non-natural acid such as Phenylglycine, TIC, naphthylelanine (Nol), ring-methylated derivatives of Phe, halogenated derivatives of Phe or o-methyl-Tyr.

[0342] In addition to the above, the peptides of the present invention may also include one or more modified amino acids or one or more non-amino acid monomers (e.g. fatty acids, complex carbohydrates etc).

[0343] As used herein in the specification and in the claims section below the term “amino acid” or “amino acids” is understood to include the 20 naturally occurring amino acids; those amino acids often modified post-translationally in vivo, including, for example, hydroxyproline, phosphoserine and phosphothreonine; and other unusual amino acids including, but not limited to, 2-aminoadipic acid, hydroxylysine, isodesmosine, nor-valine, nor-leucine and ornithine. Furthermore, the term “amino acid” includes both D- and L-amino acids.

[0344] Table 1 Non-Conventional or Modified Amino Acids which can be Used with the Present Invention.

TABLE 1

| Non-conventional amino acid | Code | Non-conventional amino acid | Code |
|---|---|---|---|
| α-aminobutyric acid | Abu | L-N-methylalanine | Nmala |
| α-amino-α-methylbutyrate | Mgabu | L-N-methylarginine | Nmarg |
| aminocyclopropane- | Cpro | L-N-methylasparagine | Nmasn |
| Carboxylate | | L-N-methylaspartic acid | Nmasp |
| aminoisobutyric acid | Aib | L-N-methylcysteine | Nmcys |
| aminonorbornyl- | Norb | L-N-methylglutamine | Nmgin |
| Carboxylate | | L-N-methylglutamic acid | Nmglu |
| Cyclohexylalanine | Chexa | L-N-methylhistidine | Nmhis |
| Cyclopentylalanine | Cpen | L-N-methylisolleucine | Nmile |
| D-alanine | Dal | L-N-methylleucine | Nmleu |
| D-arginine | Darg | L-N-methyllysine | Nmlys |
| D-aspartic acid | Dasp | L-N-methylmethionine | Nmmet |
| D-cysteine | Dcys | L-N-methylnorleucine | Nmnle |
| D-glutamine | Dgln | L-N-methylnorvaline | Nmnva |
| D-glutamic acid | Dglu | L-N-methylornithine | Nmorn |
| D-histidine | Dhis | L-N-methylphenylalanine | Nmphe |
| D-isoleucine | Dile | L-N-methylproline | Nmpro |
| D-leucine | Dleu | L-N-methylserine | Nmser |
| D-lysine | Dlys | L-N-methylthreonine | Nmthr |
| D-methionine | Dmet | L-N-methyltryptophan | Nmtrp |
| D-ornithine | Dorn | L-N-methyltyrosine | Nmtyr |
| D-phenylalanine | Dphe | L-N-methylvaline | Nmval |
| D-proline | Dpro | L-N-methylethylglycine | Nmetg |
| D-serine | Dser | L-N-methyl-t-butylglycine | Nmtbug |
| D-threonine | Dthr | L-norleucine | Nle |
| D-tryptophan | Dtrp | L-norvaline | Nva |
| D-tyrosine | Dtyr | α-methyl-aminoisobutyrate | Maib |
| D-valine | Dval | α-methyl-γ-aminobutyrate | Mgabu |
| D-α-methylalanine | Dmala | α-methylcyclohexylalanine | Mchexa |
| D-α-methylarginine | Dmarg | α-methylcyclopentylalanine | Mcpen |
| D-α-methylasparagine | Dmasn | α-methyl-α-napthylalanine | Manap |
| D-α-methylaspartate | Dmasp | α-methylpenicillamine | Mpen |
| D-α-methylcysteine | Dmcys | N-(4-aminobutyl)glycine | Nglu |
| D-α-methylglutamine | Dmgln | N-(2-aminoethyl)glycine | Naeg |
| D-α-methylhistidine | Dmhis | N-(3-aminopropyl)glycine | Norn |
| D-α-methylisoleucine | Dmile | N-amino-α-methylbutyrate | Nmaabu |
| D-α-methylleucine | Dmleu | α-napthylalanine | Anap |
| D-α-methyllysine | Dmlys | N-benzylglycine | Nphe |
| D-α-methylmethionine | Dmmet | N-(2-carbamylethyl)glycine | Ngln |
| D-α-methylornithine | Dmorn | N-(carbamylmethyl)glycine | Nasn |
| D-α-methylphenylalanine | Dmphe | N-(2-carboxyethyl)glycine | Nglu |
| D-α-methylproline | Dmpro | N-(carboxymethyl)glycine | Nasp |
| D-α-methylserine | Dmser | N-cyclobutylglycine | Ncbut |
| D-α-methylthreonine | Dmthr | N-cycloheptylglycine | Nchep |
| D-α-methyltryptophan | Dmtrp | N-cyclohexylglycine | Nchex |
| D-α-methyltyrosine | Dmty | N-cyclodecylglycine | Ncdec |
| D-α-methylvaline | Dmval | N-cyclododeclglycine | Ncdod |
| D-α-methylalnine | Dnmala | N-cyclooctylglycine | Ncoct |
| D-α-methylarginine | Dnmarg | N-cyclopropylglycine | Ncpro |
| D-α-methylasparagine | Dnmasn | N-cycloundecylglycine | Ncund |
| D-α-methylasparatate | Dnmasp | N-(2,2-diphenylethyl)glycine | Nbhm |
| D-α-methylcysteine | Dnmcys | N-(3,3- | Nbhe |
| | | diphenylpropyl)glycine | |
| D-N-methylleucine | Dnmleu | N-(3-indolylyethyl) glycine | Nhtrp |
| D-N-methyllysine | Dnmlys | N-methyl-γ-aminobutyrate | Nmgabu |
| N-methylcyclohexylalanine | Nmchexa | D-N-methylmethionine | Dnmmet |
| D-N-methylornithine | Dnmorn | N-methylcyclopentylalanine | Nmcpen |
| N-methylglycine | Nala | D-N-methylphenylalanine | Dnmphe |
| N-methylaminoisobutyrate | Nmaib | D-N-methylproline | Dnmpro |
| N-(1-methylpropyl)glycine | Nile | D-N-methylserine | Dnmser |
| N-(2-methylpropyl)glycine | Nile | D-N-methylserine | Dnmser |
| N-(2-methylpropyl)glycine | Nleu | D-N-methylthreonine | Dnmthr |
| D-N-methyltryptophan | Dnmtrp | N-(1-methylethyl)glycine | Nva |
| D-N-methyltyrosine | Dnmtyr | N-methyla-napthylalanine | Nmanap |
| D-N-methylvaline | Dnmval | N-methylpenicillamine | Nmpen |
| γ-aminobutyric acid | Gabu | N-(p-hydroxyphenyl)glycine | Nhtyr |
| L-t-butylglycine | Tbug | N-(thiomethyl)glycine | Ncys |
| L-ethylglycine | Etg | penicillamine | Pen |
| L-homophenylalanine | Hphe | L-α-methylalanine | Mala |
| L-α-methylarginine | Marg | L-α-methylasparagine | Masn |
| L-α-methylaspartate | Masp | L-α-methyl-t-butylglycine | Mtbug |
| L-α-methylcysteine | Mcys | L-methylethylglycine | Metg |
| L-α-methylglutamine | Mgln | L-α-methylglutamate | Mglu |
| L-α-methylhistidine | Mhis | L-α-methylhomo | Mhphe |
| | | phenylalanine | |
| L-α-methylisoleucine | Mile | N-(2-methylthioethyl)glycine | Nmet |
| D-N-methylglutamine | Dnmgln | N-(3- | Narg |
| | | guanidinopropyl)glycine | |
| D-N-methylglutamate | Dnmglu | N-(1-hydroxyethyl)glycine | Nthr |
| D-N-methylhistidine | Dnmhis | N-(hydroxyethyl)glycine | Nser |
| D-N-methylisoleucine | Dnmile | N-(imidazolylethyl)glycine | Nhis |
| D-N-methylleucine | Dnmleu | N-(3-indolylyethyl)glycine | Nhtrp |
| D-N-methyllysine | Dnmlys | N-methyl-γ-aminobutyrate | Nmgabu |
| N- | Nmchexa | D-N-methylmethionine | Dnmmet |
| methylcyclohexylalanine | | | |
| D-N-methylornithine | Dnmorn | N-methylcyclopentylalanine | Nmcpen |
| N-methylglycine | Nala | D-N-methylphenylalanine | Dnmphe |
| N-methylaminoisobutyrate | Nmaib | D-N-methylproline | Dnmpro |
| N-(1-methylpropyl)glycine | Nile | D-N-methylserine | Dnmser |
| N-(2-methylpropyl)glycine | Nleu | D-N-methylthreonine | Dnmthr |
| D-N-methyltryptophan | Dnmtrp | N-(1-methylethyl)glycine | Nval |
| D-N-methyltyrosine | Dnmtyr | N-methyla-napthylalanine | Nmanap |
| D-N-methylvaline | Dnmval | N-methylpenicillamine | Nmpen |
| γ-aminobutyric acid | Gabu | N-(p-hydroxyphenyl)glycine | Nhtyr |
| L-t-butylglycine | Tbug | N-(thiomethyl)glycine | Ncys |
| L-ethylglycine | Etg | penicillamine | Pen |
| L-homophenylalanine | Hphe | L-α-methylalanine | Mala |
| L-α-methylarginine | Marg | L-α-methylasparagine | Masn |
| L-α-methylaspartate | Masp | L-α-methyl-t-butylglycine | Mtbug |
| L-α-methylcysteine | Mcys | L-methylethylglycine | Metg |
| L-α-methylglutamine | Mgln | L-α-methylglutamate | Mglu |
| L-α-methylhistidine | Mhis | L-α- | Mhphe |
| | | methylhomophenylalanine | |
| L-α-methylisoleucine | Mile | N-(2-methylthioethyl)glycine | Nmet |
| L-α-methylleucine | Mleu | L-α-methyllysine | Mlys |
| L-α-methylmethionine | Mmet | L-α-methylnorleucine | Mnle |
| L-α-methylnorvaline | Mnva | L-α-methylornithine | Morn |
| L-α-methylphenylalanine | Mphe | L-α-methylproline | Mpro |
| L-α-methylserine | mser | L-α-methylthreonine | Mthr |
| L-α-methylvaline | Mtrp | L-α-methyltyrosine | Mtyr |
| L-α-methylleucine | Mval | L-N-methylhomophenylalanine | Nmhphe |
| | Nnbhm | | |
| N-(N-(2,2-diphenylethyl) | | N-(N-(3,3-diphenylpropyl) | |
| carbamylmethyl-glycine | Nnbhm | carbamylmethyl(1)glycine | Nnbhe |
| 1-carboxy-1-(2,2-diphenyl | Nmbc | | |
| ethylamino)cyclopropane | | | |

[0345] Since the peptides of the present invention are preferably utilized in diagnostics which require the peptides to be in soluble form, the peptides of the present invention preferably include one or more non-natural or natural polar amino acids, including but not limited to serine and threonine which are capable of increasing peptide solubility due to their hydroxyl-containing side chain.

[0346] The peptides of the present invention are preferably utilized in a linear form, although it will be appreciated that in cases where cyclicization does not severely interfere with peptide characteristics, cyclic forms of the peptide can also be utilized.

[0347] The peptides of present invention can be biochemically synthesized such as by using standard solid phase techniques. These methods include exclusive solid phase synthesis well known in the art, partial solid phase synthesis methods, fragment condensation, classical solution synthesis. These methods are preferably used when the peptide is relatively short (i.e., 10 kDa) and/or when it cannot be produced by recombinant techniques (i.e., not encoded by a nucleic acid sequence) and therefore involves different chemistry.

[0348] Synthetic peptides can be purified by preparative high performance liquid chromatography and the composition of which can be confirmed via amino acid sequencing.

[0349] In cases where large amounts of the peptides of the present invention are desired, the peptides of the present invention can be generated using recombinant techniques such as described by Bitter et al., (1987) Methods in Enzymol. 153:516-544, Studier et al. (1990) Methods in Enzymol. 185:60-89, Brisson et al. (1984) Nature 310:511-514, Takamatsu et al. (1987) EMBO J. 6:307-311, Coruzzi et al. (1984) EMBO J. 3:1671-1680 and Brogli et al., (1984) Science 224:838-843, Gurley et al. (1986) Mol. Cell. Biol. 6:559-565 and Weissbach & Weissbach, 1988, Methods for Plant Molecular Biology, Academic Press, NY, Section VIII, pp 421-463 and also as described above.

Antibodies

[0350] “Antibody” refers to a polypeptide ligand that is preferably substantially encoded by an immunoglobulin gene or immunoglobulin genes, or fragments thereof, which specifically binds and recognizes an epitope (e.g., an antigen). The recognized immunoglobulin genes include the kappa and lambda light chain constant region genes, the alpha, gamma, delta, epsilon and mu heavy chain constant region genes, and the myriad-immunoglobulin variable region genes. Antibodies exist, e.g., as intact immunoglobulins or as a number of well characterized fragments produced by digestion with various peptidases. This includes, e.g., Fab′ and F(ab)′₂ fragments. The term “antibody,” as used herein, also includes antibody fragments either produced by the modification of whole antibodies or those synthesized de novo using recombinant DNA methodologies. It also includes polyclonal antibodies, monoclonal antibodies, chimeric antibodies, humanized antibodies, or single chain antibodies. “Fc” portion of an antibody refers to that portion of an immunoglobulin heavy chain that comprises one or more heavy chain constant region domains, CH1, CH2 and CH3, but does not include the heavy chain variable region.

[0351] The functional fragments of antibodies, such as Fab, F(ab′)2, and Fv that are capable of binding to macrophages, are described as follows: (1) Fab, the fragment which contains a monovalent antigen-binding fragment of an antibody molecule, can be produced by digestion of whole antibody with the enzyme papain to yield an intact light chain and a portion of one heavy chain; (2) Fab′, the fragment of an antibody molecule that can be obtained by treating whole antibody with pepsin, followed by reduction, to yield an intact light chain and a portion of the heavy chain; two Fab′ fragments are obtained per antibody molecule; (3) (Fab′)₂, the fragment of the antibody that can be obtained by treating whole antibody with the enzyme pepsin without subsequent reduction; F(ab′)2 is a dimer of two Fab′ fragments held together by two disulfide bonds; (4) Fv, defined as a genetically engineered fragment containing the variable region of the light chain and the variable region of the heavy chain expressed as two chains; and (5) Single chain antibody (“SCA”), a genetically engineered molecule containing the variable region of the light chain and the variable region of the heavy chain, linked by a suitable polypeptide linker as a genetically fused single chain molecule.

[0352] Methods of producing polyclonal and monoclonal antibodies as well as fragments thereof are well known in the art (See for example, Harlow and Lane, Antibodies: A Laboratory Manual, Cold Spring Harbor Laboratory, New York, 1988, incorporated herein by reference).

[0353] Antibody fragments according to the present invention can be prepared by proteolytic hydrolysis of the antibody or by expression in E. coli or mammalian cells (e.g. Chinese hamster ovary cell culture or other protein expression systems) of DNA encoding the fragment. Antibody fragments can be obtained by pepsin or papain digestion of whole antibodies by conventional methods. For example, antibody fragments can be produced by enzymatic cleavage of antibodies with pepsin to provide a 5S fragment denoted F(ab′)2. This fragment can be further cleaved using a thiol reducing agent, and optionally a blocking group for the sulfhydryl groups resulting from cleavage of disulfide linkages, to produce 3.5S Fab′ monovalent fragments. Alternatively, an enzymatic cleavage using pepsin produces two monovalent Fab′ fragments and an Fc fragment directly. These methods are described, for example, by Goldenberg, U.S. Pat. Nos. 4,036,945 and 4,331,647, and references contained therein, which patents are hereby incorporated by reference in their entirety. See also Porter, R. R. [Biochem. J. 73: 119-126 (1959)]. Other methods of cleaving antibodies, such as separation of heavy chains to form monovalent light-heavy chain fragments, further cleavage of fragments, or other enzymatic, chemical, or genetic techniques may also be used, so long as the fragments bind to the antigen that is recognized by the intact antibody.

[0354] Fv fragments comprise an association of VH and VL chains. This association may be noncovalent, as described in Inbar et al. [Proc. Nat'l Acad. Sci. USA 69:2659-62 (19720]. Alternatively, the variable chains can be linked by an intermolecular disulfide bond or cross-linked by chemicals such as glutaraldehyde. Preferably, the Fv fragments comprise VH and VL chains connected by a peptide linker. These single-chain antigen binding proteins (sFv) are prepared by constructing a structural gene comprising DNA sequences encoding the VH and VL domains connected by an oligonucleotide. The structural gene is inserted into an expression vector, which is subsequently introduced into a host cell such as E. coli. The recombinant host cells synthesize a single polypeptide chain with a linker peptide bridging the two V domains. Methods for producing sFvs are described, for example, by [Whitlow and Filpula, Methods 2: 97-105 (1991); Bird et al., Science 242:423-426 (1988); Pack et al., Bio/Technology 11:1271-77 (1993); and U.S. Pat. No. 4,946,778, which is hereby incorporated by reference in its entirety.

[0355] Another form of an antibody fragment is a peptide coding for a single complementarity-determining region (CDR). CDR peptides (“minimal recognition units”) can be obtained by constructing genes encoding the CDR of an antibody of interest. Such genes are prepared, for example, by using the polymerase chain reaction to synthesize the variable region from RNA of antibody-producing cells. See, for example, Larrick and Fry [Methods, 2: 106-10 (1991)].

[0356] Humanized forms of non-human (e.g., murine) antibodies are chimeric molecules of immunoglobulins, immunoglobulin chains or fragments thereof (such as Fv, Fab, Fab′, F(ab′) or other antigen-binding subsequences of antibodies) which contain minimal sequence derived from non-human immunoglobulin. Humanized antibodies include human immunoglobulins (recipient antibody) in which residues from a complementary determining region (CDR) of the recipient are replaced by residues from a CDR of a non-human species (donor antibody) Such as mouse, rat or rabbit having the desired specificity, affinity and capacity. In some instances, Fv framework residues of the human immunoglobulin are replaced by corresponding non-human residues. Humanized antibodies may also comprise residues which are found neither in the recipient antibody nor in the imported CDR or framework sequences. In general, the humanized antibody will comprise substantially all of at least one, and typically two, variable domains, in which all or substantially all of the CDR regions correspond to those of a non-human immunoglobulin and all or substantially all of the FR regions are those of a human immunoglobulin consensus sequence. The humanized antibody optimally also will comprise at least a portion of an immunoglobulin constant region (Fc), typically that of a human immunoglobulin [Jones et al., Nature, 321:522-525 (1986); Riechmann et al., Nature, 332:323-329 (1988); and Presta, Curr. Op. Struct. Biol., 2:593-596 (1992)].

[0357] Methods for humanizing non-human antibodies are well known in the art. Generally, a humanized antibody has one or more amino acid residues introduced into it from a source which is non-human. These non-human amino acid residues are often referred to as import residues, which are typically taken from an import variable domain. Humanization can be essentially performed following the method of Winter and co-workers [Jones et al., Nature, 321:522-525 (1986); Riechmann et al., Nature 332:323-327 (1988); Verhoeyen et al., Science, 239:1534-1536 (1988)], by substituting rodent CDRs or CDR sequences for the corresponding sequences of a human antibody. Accordingly, such humanized antibodies are chimeric antibodies (U.S. Pat. No. 4,816,567), wherein substantially less than an intact human variable domain has been substituted by the corresponding sequence from a non-human species. In practice, humanized antibodies are typically human antibodies in which some CDR residues and possibly some FR residues are substituted by residues from analogous sites in rodent antibodies.

[0358] Human antibodies can also be produced using various techniques known in the art, including phage display libraries [Hoogenboom and Winter, J. Mol. Biol., 227:381 (1991); Marks et al., J. Mol. Biol., 222:581 (1991)]. The techniques of Cole et al. and Boerner et al. are also available for the preparation of human monoclonal antibodies (Cole et al., Monoclonal Antibodies and Cancer Therapy, Alan R. Liss, p. 77 (1985) and Boemer et al., J. Immunol., 147(1):86-95 (1991)]. Similarly, human antibodies can be made by introduction of human immunoglobulin loci into transgenic animals, e.g., mice in which the endogenous immunoglobulin genes have been partially or completely inactivated. Upon challenge, human antibody production is observed, which closely resembles that seen in humans in all respects, including gene rearrangement, assembly, and antibody repertoire. This approach is described, for example, in U.S. Pat. Nos. 5,545,807; 5,545,806; 5,569,825; 5,625,126; 5,633,425; 5,661,016, and in the following scientific publications: Marks et al., Bio/Technology 10: 779-783 (1992); Lonberg et al., Nature 368: 856-859 (1994); Morrison, Nature 368 812-13 (1994); Fishwild et al., Nature Biotechnology 14, 845-51 (1996); Neuberger, Nature Biotechnology 14: 826 (1996); and Lonberg and Huszar, Intern. Rev. Immunol. 13, 65-93 (1995).

[0359] Preferably, the antibody of this aspect of the present invention specifically binds at least one epitope of the polypeptide variants of the present invention. As used herein, the term “epitope” refers to any antigenic determinant on an antigen to which the paratope of an antibody binds.

[0360] Epitopic determinants usually consist of chemically active surface groupings of molecules such as amino acids or carbohydrate side chains and usually have specific three dimensional structural characteristics, as well as specific charge characteristics.

[0361] Optionally, a unique epitope may be created in a variant due to a change in one or more post-translational modifications, including but not limited to glycosylation and/or phosphorylation, as described below. Such a change may also cause a new epitope to be created, for example through removal of glycosylation at a particular site.

[0362] An epitope according to the present invention may also optionally comprise part or all of a unique sequence portion of a variant according to the present invention in combination with at least one other portion of the variant which is not contiguous to the unique sequence portion in the linear polypeptide itself, yet which are able to form an epitope in combination. One or more unique sequence portions may optionally combine with one or more other non-contiguous portions of the variant (including a portion which may have high homology to a portion of the known protein) to form an epitope.

Immunoassays

[0363] In another embodiment of the present invention, an immunoassay can be used to qualitatively or quantitatively detect and analyze markers in a sample. This method comprises: providing an antibody that specifically binds to a marker; contacting a sample with the antibody; and detecting the presence of a complex of the antibody bound to the marker in the sample.

[0364] To prepare an antibody that specifically binds to a marker, purified protein markers can be used. Antibodies that specifically bind to a protein marker can be prepared using any suitable methods known in the art.

[0365] After the antibody is provided, a marker can be detected and/or quantified using any of a number of well recognized immunological binding assays. Useful assays include, for example, an enzyme immune assay (EIA) Such as enzyme-linked immunosorbent assay (ELISA), a radioimmune assay (RIA), a Western blot assay, or a slot blot assay see, e.g., U.S. Pat. Nos. 4,366,241; 4,376,110; 4,517,288; and 4,837,168). Generally, a sample obtained from a subject can be contacted with the antibody that specifically binds the marker.

[0366] Optionally, the antibody can be fixed to a solid support to facilitate washing and subsequent isolation of the complex, prior to contacting the antibody with a sample. Examples of solid supports include but are not limited to glass or plastic in the form of, e.g., a microtiter plate, a stick, a bead, or a microbead. Antibodies can also be attached to a solid support.

[0367] After incubating the sample with antibodies, the mixture is washed and the antibody-marker complex formed can be detected. This can be accomplished by incubating the washed mixture with a detection reagent. Alternatively, the marker in the sample can be detected using an indirect assay, wherein, for example, a second, labeled antibody is used to detect bound marker-specific antibody, and/or in a competition or inhibition assay wherein, for example, a monoclonal antibody which binds to a distinct epitope of the marker are incubated simultaneously with the mixture.

[0368] Throughout the assays, incubation and/or washing steps may be required after each combination of reagents. Incubation steps can vary from about 5 seconds to several hours, preferably from about 5 minutes to about 24 hours. However, the incubation time will depend upon the assay format, marker, volume of solution, concentrations and the like. Usually the assays will be carried out at ambient temperature, although they can be conducted over a range of temperatures, such as 10° C. to 40° C.

[0369] The immunoassay can be used to determine a test amount of a marker in a sample from a subject. First, a test amount of a marker in a sample can be detected using the immunoassay methods described above. If a marker is present in the sample, it will form an antibody-marker complex with an antibody that specifically binds the marker under suitable incubation conditions described above. The amount of an antibody-marker complex can optionally be determined by comparing to a standard. As noted above, the test amount of marker need not be measured in absolute units, as long as the unit of measurement can be compared to a control amount and/or signal.

[0370] Preferably used are antibodies which specifically interact with the polypeptides of the present invention and not with wild type proteins or other isoforms thereof, for example. Such antibodies are directed, for example, to the unique sequence portions of the polypeptide variants of the present invention, including but not limited to bridges, heads, tails and insertions described in greater detail below. Preferred embodiments of antibodies according to the present invention are described in greater detail with regard to the section entitled “Antibodies”.

[0371] Radio-immunoassay (RIA): In one version, this method involves precipitation of the desired substrate and in the methods detailed hereinbelow, with a specific antibody and radiolabelled antibody binding protein (e.g., protein A labeled with I¹²⁵) immobilized on a precipitable carrier such as agarose beads. The number of counts in the precipitated pellet is proportional to the amount of substrate.

[0372] In an alternate version of the RIA, a labeled substrate and an unlabelled antibody binding protein are employed. A sample containing an unknown amount of substrate is added in varying amounts. The decrease in precipitated counts from the labeled substrate is proportional to the amount of substrate in the added sample.

[0373] Enzyme linked immunosorbent assay (ELISA): This method involves fixation of a sample (e.g., fixed cells or a proteinaceous solution) containing a protein substrate to a surface such as a well of a microtiter plate. A substrate specific antibody coupled to an enzyme is applied and allowed to bind to the substrate. Presence of the antibody is then detected and quantitated by a colorimetric reaction employing the enzyme coupled to the antibody. Enzymes commonly employed in this method include horseradish peroxidase and alkaline phosphatase. If well calibrated and within the linear range of response, the amount of substrate present in the sample is proportional to the amount of color produced. A substrate standard is generally employed to improve quantitative accuracy.

[0374] Western blot: This method involves separation of a substrate from other protein by means of an acrylamide gel followed by transfer of the substrate to a membrane (e.g., nylon or PVDF). Presence of the substrate is then detected by antibodies specific to the substrate, which are in turn detected by antibody binding reagents. Antibody binding reagents may be, for example, protein A, or other antibodies. Antibody binding reagents may be radiolabelled or enzyme linked as described hereinabove. Detection may be by autoradiography, colorimetric reaction or chemiluminescence. This method allows both quantitation of an amount of substrate and determination of its identity by a relative position on the membrane which is indicative of a migration distance in the acrylamide gel during electrophoresis.

[0375] Immunohistochemical analysis: This method involves detection of a substrate in situ in fixed cells by substrate specific antibodies. The substrate specific antibodies may be enzyme linked or linked to fluorophores. Detection is by microscopy and subjective evaluation. If enzyme linked antibodies are employed, a colorimetric reaction may be required.

[0376] Fluorescence activated cell sorting (FACS): This method involves detection of a substrate in situ in cells by substrate specific antibodies. The substrate specific antibodies are linked to fluorophores. Detection is by means of a cell sorting machine which reads the wavelength of light emitted from each cell as it passes through a light beam. This method may employ two or more antibodies simultaneously.

Radio-Imaging Methods

[0377] These methods include but are not limited to, positron emission tomography (PET) single photon emission computed tomography (SPECT). Both of these techniques are non-invasive, and can be used to detect and/or measure a wide variety of tissue events and/or functions, such as detecting cancerous cells for example. Unlike PET, SPECT can optionally be used with two labels simultaneously. SPECT has some other advantages as well, for example with regard to cost and the types of labels that can be used. For example, U.S. Pat. No. 6,696,686 describes the use of SPECT for detection of breast cancer, and is hereby incorporated by reference as if fully set forth herein.

Display Libraries

[0378] According to still another aspect of the present invention there is provided a display library comprising a plurality of display vehicles (such as phages, viruses or bacteria) each displaying at least 6, at least 7, at least 8, at least 9, at least 10, 10-15, 12-17, 15-20, 15-30 or 20-50 consecutive amino acids derived from the polypeptide sequences of the present invention.

[0379] Methods of constructing such display libraries are well known in the art. Such methods are described in, for example, Young A C, et al., “The three-dimensional structures of a polysaccharide binding antibody to Cryptococcus neoformans and its complex with a peptide from a phage display library: implications for the identification of peptide mimotopes” J Mol Biol 1997 Dec. 12; 274(4):622-34; Giebel L B et al. “Screening of cyclic peptide phage libraries identifies ligands that bind streptavidin with high affinities” Biochemistry 1995 Nov. 28; 34(47): 15430-5; Davies E L et al., “Selection of specific phage-display antibodies using libraries derived from chicken immunoglobulin genes” J Immunol Methods 1995 Oct. 12; 186(1):125-35; Jones C R T al. “Current trends in molecular recognition and bioseparation” J Chromatogr A 1995 Jul. 14; 707(1):3-22; Deng S J et al. “Basis for selection of improved carbohydrate-binding single-chain antibodies from synthetic gene libraries” Proc Natl Acad Sci USA 1995 May 23; 92(11):4992-6; and Deng S J et al. “Selection of antibody single-chain variable fragments with improved carbohydrate binding by phage display” J Biol Chem 1994 Apr. 1; 269(13):9533-8, which are incorporated herein by reference.

[0380] The following sections relate to Candidate Marker Examples. It should be noted that Table numbering is restarted within each example relating to each cluster (each such section begins with “Description for Cluster” followed by the name of the cluster).

Candidate Marker Examples Section

[0381] This Section relates to Examples of sequences and markers according to the present invention.

[0382] Description of the methodology undertaken to uncover the biomolecular sequences of the present invention

[0383] Human ESTs and cDNAs were obtained from GenBank versions 136 (Jun. 15, 2003 ftp.ncbi.nih.gov/genbank/release.notes/bgb136.release.notes); NCBI genome assembly of April 2003; RefSeq sequences from June 2003; Genbank version 139 (December 2003); Human Genome from NCBI (Build 34) (from October 2003); and RefSeq sequences from December 2003. With regard to GenBank sequences, the human EST sequences from the EST (GBEST) Section and the human mRNA sequences from the primate (GBPR1) Section were used; also the human nucleotide RefSeq mRNA sequences were used (see for example www.ncbi.nlm.nih.gov/Genbank/GenbankOverview.html and for a reference to the EST section, see www.ncbi.nlm.nih.gov/dbEST/; a general reference to dbEST, the EST database in GenBank, may be found in Boguski et al, Nat Genet. 1993 August; 4(4):332-3; all of which are hereby incorporated by reference as if fully set forth herein).

[0384] Novel splice variants were predicted using the LEADS clustering and assembly system as described in Sorek, R., Ast, G. & Graur, D. Alu-containing exons are alternatively spliced. Genome Res 12, 1060-7 (2002); U.S. Pat. No. 6,625,545; and U.S. patent application Ser. No. 10/426,002, published as U.S. 20040101876 on May 27, 2004; all of which are hereby incorporated by reference as if fully set forth herein. Briefly, the software cleans the expressed sequences from repeats, vectors and immunoglobulins. It then aligns the expressed sequences to the genome taking alternatively splicing into account and clusters overlapping expressed sequences into “clusters” that represent genes or partial genes.

[0385] These were annotated using the GeneCarta (Compugen, Tel-Aviv, Israel) platform. The GeneCarta platform includes a rich pool of annotations, sequence information (particularly of spliced sequences), chromosomal information, alignments, and additional information such as SNPs, gene ontology terms, expression profiles, functional analyses, detailed domain structures, known and predicted proteins and detailed homology reports.

### Description for Cluster S71513

[0386] Cluster S71513 features 1 transcript(s) and 6 segment(s) of interest, the names for which are given in Tables 1 and 2, respectively, the sequences themselves are given at the end of the application. The selected protein variants are given in table 3.

TABLE 1
Transcripts of interest

| Transcript Name | Sequence ID No. |
|---|---|
| S71513_T2 | 1 |

[0387] TABLE 2
Segments of interest

| Segment Name | Sequence ID No. |
|---|---|
| S71513_node_0 | 2 |
| S71513_node_5 | 3 |
| S71513_node_6 | 4 |
| S71513_node_8 | 5 |
| S71513_node_1 | 6 |
| S71513_node_4 | 7 |

[0388] TABLE 3
Proteins of interest

| Protein Name | Sequence ID No. | Corresponding Transcript(s) |
|---|---|---|
| S71513_P2 | 9 | S71513_T2 (SEQ ID NO: 1) |

[0389] These sequences are variants of the known protein Small inducible cytokine A2 precursor (SEQ ID NO:8) (SwissProt accession identifier SY02_HUMAN; known also according to the synonyms CCL2; Monocyte chemotactic protein 1; MCP-1; Monocyte chemoattractant protein-1; Monocyte chemotactic and activating factor; MCAF; Monocyte secretory protein JE; HCl 1), referred to herein as the previously known protein.

[0390] Protein Small inducible cytokine A2 precursor (SEQ ID NO:8) is known or believed to have the following function(s): chemotactic factor that attracts monocytes and basophils but not neutrophils or eosinophils. Augments monocyte anti-tumor activity. Has been implicated in the pathogenesis of diseases characterized by monocytic infiltrates, like psoriasis, rheumatoid arthritis or atherosclerosis. May be involved in the recruitment of monocytes into the arterial wall during the disease process of atherosclerosis. Binds to CCR2 and CCR4. The sequence for protein Small inducible cytokine A2 precursor (SEQ ID NO:8) is given at the end of the application, as “Small inducible cytokine A2 precursor amino acid sequence” (SEQ ID NO:8). Known polymorphisms for this sequence are as shown in Table 4.

TABLE 4
Amino acid mutations for Known Protein

| SNP position(s) on | |
|---|---|
| amino acid sequence | Comment |
| 76 | A -> T./FTId = VAR_001632. |
| 24 | Missing: Loss of activity. |
| 25-32 | Missing: Loss of activity. |
| 24-85 | MISSING: 90% REDUCTION IN ACTIVITY. |
| 24-91 | MISSING: 83% REDUCTION IN ACTIVITY. |
| 26 | D->A: 90% REDUCTION IN ACTIVITY. |
| 29 | N->A: 50% REDUCTION IN ACTIVITY. |
| 47 | R->F: 95% REDUCTION IN ACTIVITY. |
| 50 | S->Q: 40% REDUCTION IN ACTIVITY. |
| 51 | Y->D: LOSS OF ACTIVITY. |
| 53 | R->L: LOSS OF ACTIVITY. |
| 91 | D->L: 90% REDUCTION IN ACTIVITY. |

[0391] Protein Small inducible cytokine A2 precursor (SEQ ID NO:8) localization is believed to be Secreted.

[0392] Rong et al reported that MCP-1 causes (or at least is associated with) an inflammatory action of peritoneal fluid of women with endometriosis (Fertil Steril. 2002 October; 78(4):843-8). Therefore, variants according to the present invention are believed to be useful as diagnostic markers for endometriosis.

[0393] The following GO Annotation(s) apply to the previously known protein. The following annotation(s) were found: protein amino acid phosphorylation; calcium ion homeostasis; anti-apoptosis; chemotaxis; inflammatory response; humoral defense mechanism; cell adhesion; G-protein signaling, coupled to cyclic nucleotide second messenger; JAK-STAT cascade; cell-cell signaling; response to pathogenic bacteria; viral genome replication, which are annotation(s) related to Biological Process; protein kinase; ligand; chemokine, which are annotation(s) related to Molecular Function; and extracellular space; membrane, which are annotation(s) related to Cellular Component.

[0394] The GO assignment relies on information from one or more of the SwissProt/TremBl Protein knowledgebase, available from <http://www.expasy.ch/sprot/>; or Locuslink, available from <http://www.ncbi.nlm.nih.gov/projects/LocusLink/>.

[0395] As noted above, cluster S71513 features 1 transcript(s), which were listed in Table 1 above. These transcript(s) encode for protein(s) which are variant(s) of protein Small inducible cytokine A2 precursor (SEQ ID NO:8). A description of each variant protein according to the present invention is now provided.

[0396] Variant protein S71513_P2 (SEQ ID NO:9) according to the present invention has an amino acid sequence as given at the end of the application; it is encoded by transcript(s) S71513_T2 (SEQ ID NO:1). An alignment is given to the known protein (Small inducible cytokine A2 precursor (SEQ ID NO:8)) at the end of the application. One or more alignments to one or more previously published protein sequences are given at the end of the application. A brief description of the relationship of the variant protein according to the present invention to each such aligned protein is as follows:

[0397] Comparison report between S71513_P2 (SEQ ID NO:9) and SY02_HUMAN (SEQ ID NO:8):

[0398] 1. An isolated chimeric polypeptide encoding for S71513_P2 (SEQ ID NO:9), comprising a first amino acid sequence being at least 90% homologous to MKVSAALLCLLLIAATFIPQGLAQPDAINAPVTCCYNFTNRKISVQRLASYRRITSSKCP KEAV corresponding to amino acids 1-64 of SY02_HUMAN (SEQ ID NO:8), which also corresponds to amino acids 1-64 of S71513_P2 (SEQ ID NO:9), and a second amino acid sequence being at least 70%, optionally at least 80%, preferably at least 85%, more preferably at least 90% and most preferably at least 95% homologous to a polypeptide having the sequence M corresponding to amino acids 65-65 of S71513_P2 (SEQ ID NO:9, wherein said first amino acid sequence and second amino acid sequence are contiguous and in a sequential order.

[0399] The location of the variant protein was determined according to results from a number of different software programs and analyses, including analyses from SignalP and other specialized programs. The variant protein is believed to be located as follows with regard to the cell: secreted. The protein localization is believed to be secreted because both signal-peptide prediction programs predict that this protein has a signal peptide, and neither trans-membrane region prediction program predicts that this protein has a trans-membrane region.

[0400] Variant protein S71513_P2 (SEQ ID NO:9) also has the following non-silent SNPs (Single Nucleotide Polymorphisms) as listed in Table 5, (given according to their position(s) on the amino acid sequence, with the alternative amino acid(s) listed; the last column indicates whether the SNP is known or not; the presence of known SNPs in variant protein S71513_P2 (SEQ ID NO:9) Sequence provides support for the deduced sequence of this variant protein according to the present invention).

TABLE 5
Amino acid mutations

| SNP position(s) on amino acid | Alternative | |
|---|---|---|
| sequence | amino acid(s) | Previously known SNP? |
| 15 | A -> | No |
| 15 | A -> G | No |
| 22 | L -> P | No |

[0401] The glycosylation sites of variant protein S71513_P2 (SEQ ID NO:9), as compared to the known protein Small inducible cytokine A2 precursor (SEQ ID NO:8), are described in Table 6 (given according to their position(s) on the amino acid sequence in the first column; the second column indicates whether the glycosylation site is present in the variant protein; and the last column indicates whether the position is different on the variant protein).

TABLE 6
Glycosylation site(s)

| Position(s) on known amino | Present in | |
|---|---|---|
| acid sequence | variant protein? | Position in variant protein? |
| 37 | yes | 37 |

[0402] The phosphorylation sites of variant protein S71513_P2 (SEQ ID NO:9), as compared to the known protein Small inducible cytokine A2 precursor (SEQ ID NO:8), are described in Table 7 (given according to their position(s) on the amino acid sequence in the first column; the second column indicates whether the phosphorylation site is present in the variant protein; and the last column indicates whether the position is different on the variant protein).

TABLE 7
Phosphorylation site(s)

| Position(s) on known amino | | Position in |
|---|---|---|
| acid sequence | Present in variant protein? | variant protein? |
| 24 | yes | 24 |

[0403] Variant protein S71513_P2 (SEQ ID NO:9) is encoded by the following transcript(s): S71513_T2 (SEQ ID NO:1), for which the sequence(s) is/are given at the end of the application. The coding portion of transcript S71513_T2 (SEQ ID NO:1) is shown in bold; this coding portion starts at position 341 and ends at position 535. The transcript also has the following SNPs as listed in Table 8 (given according to their position on the nucleotide sequence, with the alternative nucleic acid listed; the last column indicates whether the SNP is known or not; the presence of known SNPs in variant protein S71513_P2 (SEQ ID NO:9) Sequence provides support for the deduced sequence of this variant protein according to the present invention).

TABLE 8
Nucleic acid SNPs

| SNP position on nucleotide | | Previously |
|---|---|---|
| sequence | Alternative nucleic acid | known SNP? |
| 219 | G -> T | Yes |
| 222 | C -> T | Yes |
| 383 | G -> | No |
| 384 | C -> | No |
| 384 | C -> G | No |
| 403 | G -> T | No |
| 405 | T -> C | No |
| 439 | C -> T | No |
| 445 | T -> C | Yes |
| 559 | C -> T | Yes |
| 963 | A -> G | No |
| 1045 | A -> G | No |
| 1045 | A -> T | No |
| 1087 | C -> T | Yes |
| 1090 | T -> | No |
| 1090 | T -> G | No |
| 1110 | T -> | No |
| 1127 | A -> | No |
| 1203 | T -> | No |
| 1203 | T -> G | No |
| 1247 | C -> T | Yes |
| 1360 | -> G | No |
| 1360 | -> T | No |
| 1388 | T -> | No |

[0404] As noted above, cluster S71513 features 6 segment(s), which were listed in Table 2 above and for which the sequence(s) are given at the end of the application. These segment(s) are portions of nucleic acid sequence(s) which are described herein separately because they are of particular interest. A description of each segment according to the present invention is now provided.

[0405] Segment cluster S71513_node_{—}0 (SEQ ID NO:2) according to the present invention is supported by 292 libraries. The number of libraries was determined as previously described. This segment can be found in the following transcript(s): S71513_T2 (SEQ ID NO:1). Table 9 below describes the starting and ending position of this segment on each transcript.

TABLE 9
Segment location on transcripts

| | Segment | Segment |
|---|---|---|
| Transcript name | starting position | ending position |
| S71513_T2 (SEQ ID NO: 1) | 1 | 387 |

[0406] Segment cluster S71513_node_(SEQ ID NO:3) according to the present invention is supported by 39 libraries. The number of libraries was determined as previously described. This segment can be found in the following transcript(s): S71513-T2 (SEQ ID NO:1). Table 10 below describes the starting and ending position of this segment on each transcript.

TABLE 10
Segment location on transcripts

| | Segment | Segment |
|---|---|---|
| Transcript name | starting position | ending position |
| S71513_T2 (SEQ ID NO: 1) | 535 | 916 |

[0407] Segment cluster S71513_node_{—}6 (SEQ ID NO:4) according to the present invention is supported by 326 libraries. The number of libraries was determined as previously described. This segment can be found in the following transcript(s): S71513-T2 (SEQ ID NO:1). Table 11 below describes the starting and ending position of this segment on each transcript.

TABLE 11
Segment location on transcripts

| | Segment | Segment |
|---|---|---|
| Transcript name | starting position | ending position |
| S71513_T2 (SEQ ID NO: 1) | 917 | 1272 |

[0408] Segment cluster S71513_node_{—}8 (SEQ ID NO:5) according to the present invention is supported by 165 libraries. The number of libraries was determined as previously described. This segment can be found in the following transcript(s): S71513_T2 (SEQ ID NO:1). Table 12 below describes the starting and ending position of this segment on each transcript.

TABLE 12
Segment location on transcripts

| | Segment | Segment |
|---|---|---|
| Transcript name | starting position | ending position |
| S71513_T2 (SEQ ID NO: 1) | 1273 | 1404 |

[0409] According to an optional embodiment of the present invention, short segments related to the above cluster are also provided. These segments are up to about 120 bp in length, and so are included in a separate description.

[0410] Segment cluster S71513_node_{—}1 (SEQ ID NO:6) according to the present invention is supported by 296 libraries. The number of libraries was determined as previously described. This segment can be found in the following transcript(s): S71513_T2 (SEQ ID NO:1). Table 13 below describes the starting and ending position of this segment on each transcript.

TABLE 13
Segment location on transcripts

| | Segment | Segment |
|---|---|---|
| Transcript name | starting position | ending position |
| S71513_T2 (SEQ ID NO: 1) | 388 | 416 |

[0411] Segment cluster S71513_node_{—}4 (SEQ ID NO:7) according to the present invention is supported by 319 libraries. The number of libraries was determined as previously described. This segment can be found in the following transcript(s): S71513 T2 (SEQ ID NO:1). Table 14 below describes the starting and ending position of this segment on each transcript.

TABLE 14
Segment location on transcripts

| | Segment | Segment |
|---|---|---|
| Transcript name | starting position | ending position |
| S71513_T2 (SEQ ID NO: 1) | 417 | 534 |

[0412] Variant protein alignment to the previously known protein:

| Sequence name: SY02_HUMAN (SEQ ID NO: 8) | | | |
|---|---|---|---|
| Sequence documentation: | | | |
| Alignment of: S71513_P2 (SEQ ID NO: 9) × SY02_HUMAN (SEQ ID NO: 8) .. | | | |
| Alignment segment 1/1: | | | |
| Quality: | 619.00 | Escore: | 0 |
| Matching length: | 65 | Total length: | 65 |
| Matching Percent Similarity: | 100.00 | Matching Percent Identity: | 98.46 |
| Total Percent Similarity: | 100.00 | Total Percent Identity: | 98.46 |
| Gaps: | 0 | | |

| Alignment: | | |
|---|---|---|
| | . . . . . | |
| 1 | MKVSAALLCLLLIAATFIPQGLAQPDAINAPVTCCYNFTNRKISVQRLAS | 50 |
| | \|\|\|\|\|\|\|\|\|\|\|\|\|\|\|\|\|\|\|\|\|\|\|\|\|\|\|\|\|\|\|\|\|\|\|\|\|\|\|\|\|\|\|\|\|\|\|\|\|\| | |
| 1 | MKVSAALLCLLLIAATFIPQGLAQPDAINAPVTCCYNFTNRKISVQRLAS | 50 |
| | . | |
| 51 | YRRITSSKCPKEAVM | 65 |
| | \|\|\|\|\|\|\|\|\|\|\|\|\|\|: | |
| 51 | YRRITSSKCPKEAVI | 65 |

### Description for Cluster HUMELAM1A

[0413] Cluster HUMELAM1A features 3 transcript(s) and 17 segment(s) of interest, the names for which are given in Tables 1 and 2, respectively, the sequences themselves are given at the end of the application. The selected protein variants are given in table 3.

TABLE 1
Transcripts of interest

| Transcript Name | SEQ ID No. |
|---|---|
| HUMELAM1A_T1 | 10 |
| HUMELAM1A_T5 | 11 |
| HUMELAM1A_T6 | 12 |

[0414] TABLE 2
Segments of interest

| Segment Name | SEQ ID No. |
|---|---|
| HUMELAM1A_node_5 | 13 |
| HUMELAM1A_node_8 | 14 |
| HUMELAM1A_node_10 | 15 |
| HUMELAM1A_node_11 | 16 |
| HUMELAM1A_node_13 | 17 |
| HUMELAM1A_node_15 | 18 |
| HUMELAM1A_node_18 | 19 |
| HUMELAM1A_node_19 | 20 |
| HUMELAM1A_node_20 | 21 |
| HUMELAM1A_node_22 | 22 |
| HUMELAM1A_node_33 | 23 |
| HUMELAM1A_node_0 | 24 |
| HUMELAM1A_node_2 | 25 |
| HUMELAM1A_node_7 | 26 |
| HUMELAM1A_node_24 | 27 |
| HUMELAM1A_node_26 | 28 |
| HUMELAM1A_node_29 | 29 |

[0415] TABLE 3
Proteins of interest

| Protein Name | SEQ ID No. | Corresponding Transcript(s) |
|---|---|---|
| HUMELAM1A_P2 | 31 | HUMELAM1A_T1 (SEQ ID |
| | | NO: 10) |
| HUMELAM1A_P4 | 32 | HUMELAM1A_T5 (SEQ ID |
| | | NO: 11) |
| HUMELAM1A_P5 | 33 | HUMELAM1A_T6 (SEQ ID |
| | | NO: 12) |

[0416] These sequences are variants of the known protein E-selectin precursor (SEQ ID NO:30) (SwissProt accession identifier LEM2_HUMAN (SEQ ID NO:30; known also according to the synonyms Endothelial leukocyte adhesion molecule 1; ELAM-1; Leukocyte-endothelial cell adhesion molecule 2; LECAM2; CD62E antigen), referred to herein as the previously known protein.

[0417] Protein E-selectin precursor (SEQ ID NO:30) is known or believed to have the following function(s): expressed on cytokine induced endothelial cells and mediates their binding to leukocytes. The ligand recognized by ELAM-1 is sialyl-lewis X (alpha(1->3)fucosylated derivatives of polylactosamine that are found at the nonreducing termini of glycolipids). The sequence for protein E-selectin precursor is given at the end of the application, as “E-selectin precursor amino acid sequence” (SEQ ID NO:30). Known polymorphisms for this sequence are as shown in Table 4.

TABLE 4
Amino acid mutations for Known Protein

| SNP position(s) on | |
|---|---|
| amino acid sequence | Comment |
| 21 | A -> S. /FTId = VAR_014300. |
| 31 | M -> I. /FTId = VAR_014301. |
| 130 | C -> W (in dbSNP: 5360). /FTId = VAR_011790. |
| 149 | S -> R (polymorphism associated with coronary |
| | artery disease; dbSNP: 5361). /FTId = |
| | VAR_004191. |
| 257 | Q -> P. /FTId = VAR_014302. |
| 295 | E -> K (in dbSNP: 5364). /FTId = VAR_011791. |
| 421 | E -> Q (in dbSNP: 5366). /FTId = VAR_011792. |
| 468 | H -> Y (in dbSNP: 5368). /FTId = VAR_011793. |
| 550 | P -> S. /FTId = VAR_014303. |
| 575 | L -> F (in dbSNP: 5355). /FTId = VAR_011794. |

[0418] Protein E-selectin precursor (SEQ ID NO:30) localization is believed to be Type I membrane protein.

[0419] Yang et al reported that E-selectin may be involved in, or related to, endometrisosis (Best Pract Res Clin Obstet Gynaecol. 2004 April; 18(2):305-18). Therefore, variants according to the present invention are believed to be useful as diagnostic markers for endometriosis.

[0420] The previously known protein also has the following indication(s) and/or potential therapeutic use(s): Ischaemia, cerebral. It has been investigated for clinicat/therapeutic use in humans, for example as a target for an antibody or small molecule, and/or as a direct therapeutic; available information related to these investigations is as follows. Potential pharmaceutically related or therapeutically related activity or activities of the previously known protein are as follows: E selectin agonist; Immunostimulant. A therapeutic role for a protein represented by the cluster has been predicted. The cluster was assigned this field because there was information in the drug database or the public databases (e.g., described herein above) that this protein, or part thereof, is used or can be used for a potential therapeutic indication: Anti-inflammatory; Neuroprotective.

[0421] The following GO Annotation(s) apply to the previously known protein. The following annotation(s) were found: inflammatory response; cell adhesion; heterophilic cell adhesion, which are annotation(s) related to Biological Process; protein binding; sugar binding, which are annotation(s) related to Molecular Function; and plasma membrane; integral membrane protein, which are annotation(s) related to Cellular Component.

[0422] The GO assignment relies on information from one or more of the SwissProt/TremBl Protein knowledgebase, available from <http://www.expasy.ch/sprot/>; or Locuslink, available from <http://www.ncbi.nlm.nih.gov/projects/LocusLink/>.

[0423] As noted above, cluster HUMELAM1A features 3 transcript(s), which were listed in Table 1 above. These transcript(s) encode for protein(s) which are variant(s) of protein E-selectin precursor (SEQ ID NO:30). A description of each variant protein according to the present invention is now provided.

[0424] Variant protein HUMELAM1A_P2 (SEQ ID NO:31) according to the present invention has an amino acid sequence as given at the end of the application; it is encoded by transcript(s) HUMELAM1A_T1 (SEQ ID NO:10). An alignment is given to the known protein (E-selectin precursor (SEQ ID NO:30) at the end of the application. One or more alignments to one or more previously published protein sequences are given at the end of the application. A brief description of the relationship of the variant protein according to the present invention to each such aligned protein is as follows:

[0425] Comparison report between HUMELAM1A_P2 (SEQ ID NO:31) and LEM2_HUMAN (SEQ ID NO:30):

[0426] 1. An isolated chimeric polypeptide encoding for HUMELAM1A_P2 (SEQ ID NO:31), comprising a first amino acid sequence being at least 90% homologous to MIASQFLSALTLVLLIKESGAWSYNTSTEAMTYDEASAYCQQRYTHLVAIQNKEEIEYL NSILSYSPSYYWIGIRKVNNVWVWVGTQKPLTEEAKNWAPGEPNNRQKDEDCVEIYIK REKDVGMWNDERCSKKKLALCYTAACTNTSCSGHGECVETNNYTCKCDPGFSGLKC EQIVNCTALESPEHGSLVCSHPLGNFSYNSSCSISCDRGYLPSSMETMQCMSSGEWSAPI PACNVVECDAVTNPANGFVECFQNPGSFPWNTTCTFDCEEGFELMGAQSLQCTSSGNW DNEKPTCKAVTCRAVRQPQNGSVRCSHSPAGEFTFKSSCNFTCEEGFMLQGPAQVECT TQGQWTQQIPVCEAFQCTALSNPERGYMNCLPSASGSFRYGSSCEFSCEQGFVLKGSKR LQCGPTGEWDNEKPTCE corresponding to amino acids 1-426 of LEM2_HUMAN (SEQ ID NO:30), which also corresponds to amino acids 1-426 of HUMELAM1A_P2 (SEQ ID NO:31), and a second amino acid sequence being at least 70%, optionally at least 80%, preferably at least 85%, more preferably at least 90% and most preferably at least 95% homologous to a polypeptide having the sequence GTVFVFILF (SEQ ID NO:501) corresponding to amino acids 427-435 of HUMELAM1A_P2 (SEQ ID NO:31), wherein said first amino acid sequence and second amino acid sequence are contiguous and in a sequential order.

[0427] 2. An isolated polypeptide encoding for a tail of HUMELAM1A_P2 (SEQ ID NO:31), comprising a polypeptide being at least 70%, optionally at least about 80%, preferably at least about 85%, more preferably at least about 90% and most preferably at least about 95% homologous to the sequence GTVFVFILF (SEQ ID NO:501) in HUMELAM1A_P2 (SEQ ID NO:31).

[0428] The location of the variant protein was determined according to results from a number of different software programs and analyses, including analyses from SignalP and other specialized programs. The variant protein is believed to be located as follows with regard to the cell: secreted. The protein localization is believed to be secreted because both signal-peptide prediction programs predict that this protein has a signal peptide, and neither trans-membrane region prediction program predicts that this protein has a trans-membrane region.

[0429] Variant protein HUMELAM1A_P2 (SEQ ID NO:31) also has the following non-silent SNPs (Single Nucleotide Polymorphisms) as listed in Table 5, (given according to their position(s) on the amino acid sequence, with the alternative amino acid(s) listed; the last column indicates whether the SNP is known or not; the presence of known SNPs in variant protein HUMELAM1A_P2 (SEQ ID NO:31) Sequence provides support for the deduced sequence of this variant protein according to the present invention).

TABLE 5
Amino acid mutations

| SNP position(s) on | | |
|---|---|---|
| amino acid | | |
| sequence | Alternative amino acid(s) | Previously known SNP? |
| 21 | A -> S | Yes |
| 31 | M -> I | Yes |
| 130 | C -> W | Yes |
| 149 | S -> R | Yes |
| 257 | Q -> P | Yes |
| 295 | E -> K | Yes |
| 421 | E -> Q | Yes |

[0430] The glycosylation sites of variant protein HUMELAM1A_P2 (SEQ ID NO:31), as compared to the known protein E-selectin precursor (SEQ ID NO:30), are described in Table 6 (given according to their position(s) on the amino acid sequence in the first column; the second column indicates whether the glycosylation site is present in the variant protein; and the last column indicates whether the position is different on the variant protein).

TABLE 6
Glycosylation site(s)

| Position(s) on known amino | Present | Position in variant |
|---|---|---|
| acid sequence | in variant protein? | protein? |
| 199 | yes | 199 |
| 203 | yes | 203 |
| 312 | yes | 312 |
| 145 | yes | 145 |
| 332 | yes | 332 |
| 503 | no | |
| 265 | yes | 265 |
| 160 | yes | 160 |
| 25 | yes | 25 |
| 527 | no | |
| 179 | yes | 179 |

[0431] Variant protein HUMELAM1A_P2 (SEQ ID NO:31) is encoded by the following transcript(s): HUMELAM1A_T1 (SEQ ID NO:10), for which the sequence(s) is/are given at the end of the application. The coding portion of transcript HUMELAM1A_T1 (SEQ ID NO:10) is shown in bold; this coding portion starts at position 164 and ends at position 1468. The transcript also has the following SNPs as listed in Table 7 (given according to their position on the nucleotide sequence, with the alternative nucleic acid listed; the last column indicates whether the SNP is known or not; the presence of known SNPs in variant protein HUMELAM1A_P2 (SEQ ID NO:31) Sequence provides support for the deduced sequence of this variant protein according to the present invention).

TABLE 7
Nucleic acid SNPs

| SNP position on nucleotide | | Previously |
|---|---|---|
| sequence | Alternative nucleic acid | known SNP? |
| 43 | A -> G | Yes |
| 65 | A -> G | Yes |
| 145 | G -> T | Yes |
| 224 | G -> T | Yes |
| 256 | G -> T | Yes |
| 436 | A -> G | Yes |
| 439 | A -> G | Yes |
| 553 | C -> G | Yes |
| 608 | A -> C | Yes |
| 904 | T -> C | Yes |
| 933 | A -> C | Yes |
| 1036 | T -> C | Yes |
| 1046 | G -> A | Yes |
| 1423 | C -> T | Yes |
| 1424 | G -> C | Yes |
| 1475 | A -> G | Yes |
| 1524 | T -> A | Yes |
| 1565 | T -> C | Yes |
| 1695 | T -> C | Yes |
| 1941 | C -> T | Yes |
| 1982 | T -> C | Yes |
| 2016 | C -> T | Yes |
| 2093 | T -> C | Yes |
| 2114 | T -> C | Yes |
| 2332 | T -> A | Yes |
| 2486 | A -> G | Yes |
| 3079 | T -> C | Yes |
| 3116 | T -> G | Yes |
| 3270 | A -> G | Yes |
| 3660 | A -> G | Yes |
| 3671 | C -> G | Yes |

[0432] Variant protein HUMELAM1A_P2 (SEQ ID NO:32) according to the present invention has an amino acid sequence as given at the end of the application; it is encoded by transcript(s) HUMELAM1A_T5 (SEQ ID NO:11. An alignment is given to the known protein (E-selectin precursor (SEQ ID NO:30)) at the end of the application. One or more alignments to one or more previously published protein sequences are given at the end of the application. A brief description of the relationship of the variant protein according to the present invention to each such aligned protein is as follows:

[0433] Comparison report between HUMELAM1A_P2 (SEQ ID NO:32) and LEM2_HUMAN (SEQ ID NO:30):

[0434] 1. An isolated chimeric polypeptide encoding for HUMELAM1A_P2 (SEQ ID NO:32), comprising a first amino acid sequence being at least 90% homologous to MIASQFLSALTLVLLIKESGAWSYNTSTEAMTYDEASAYCQQRYTHLVAIQNKEEIEYL NSILSYSPSYYWIGIRKVNNVWVWVGTQKPLTEEAKNWAPGEPNNRQKDEDCVEIYIK REKDVGMWNDERCSKKKLALCYTAACTNTSCSGHGECVETINNYTCKCDPGFSGLKC EQIVNCTALESPEHGSLVCSHPLGNFSYNSSCSISCDRGYLPSSMETMQCMSSGEWSAPI PACN corresponding to amino acids 1-238 of LEM2_HUMAN (SEQ ID NO:30, which also corresponds to amino acids 1-238 of HUMELAM1A_P2 (SEQ ID NO:32), and a second amino acid sequence being at least 70%, optionally at least 80%, preferably at least 85%, more preferably at least 90% and most preferably at least 95% homologous to a polypeptide having the sequence GKSL (SEQ ID NO:502) corresponding to amino acids 239-242 of HUMELAM1A_P2 (SEQ ID NO:32, wherein said first amino acid sequence and second amino acid sequence are contiguous and in a sequential order.

[0435] 2. An isolated polypeptide encoding for a tail of HUMELAM1A_P2 (SEQ ID NO:32), comprising a polypeptide being at least 70%, optionally at least about 80%, preferably at least about 85%, more preferably at least about 90% and most preferably at least about 95% homologous to the sequence GKSL (SEQ ID NO:502) in HUMELAM1A_P2 (SEQ ID NO:32.

[0436] The location of the variant protein was determined according to results from a number of different software programs and analyses, including analyses from SignalP and other specialized programs. The variant protein is believed to be located as follows with regard to the cell: secreted. The protein localization is believed to be secreted because both signal-peptide prediction programs predict that this protein has a signal peptide, and neither trans-membrane region prediction program predicts that this protein has a trans-membrane region.

[0437] Variant protein HUMELAM1A_P2 (SEQ ID NO:32) also has the following non-silent SNPs (Single Nucleotide Polymorphisms) as listed in Table 8, (given according to their position(s) on the amino acid sequence, with the alternative amino acid(s) listed; the last column indicates whether the SNP is known or not; the presence of known SNPs in variant protein HUMELAM1A_P2 (SEQ ID NO:32) Sequence provides support for the deduced sequence of this variant protein according to the present invention).

TABLE 8
Amino acid mutations

| SNP position(s) on amino acid | Alternative | |
|---|---|---|
| sequence | amino acid(s) | Previously known SNP? |
| 21 | A -> S | Yes |
| 31 | M -> I | Yes |
| 130 | C -> W | Yes |
| 149 | S -> R | Yes |

[0438] The glycosylation sites of variant protein HUMELAM1A_P2 (SEQ ID NO:32), as compared to the known protein E-selectin precursor (SEQ ID NO:30, are described in Table 9 (given according to their position(s) on the amino acid sequence in the first column; the second column indicates whether the glycosylation site is present in the variant protein; and the last column indicates whether the position is different on the variant protein).

TABLE 9
Glycosylation site(s)

| Position(s) on known amino | | Position in |
|---|---|---|
| acid sequence | Present in variant protein? | variant protein? |
| 199 | yes | 199 |
| 203 | yes | 203 |
| 312 | no | |
| 145 | yes | 145 |
| 332 | no | |
| 503 | no | |
| 265 | no | |
| 160 | yes | 160 |
| 25 | yes | 25 |
| 527 | no | |
| 179 | yes | 179 |

[0439] Variant protein HUMELAM1A_P2 (SEQ ID NO:32) is encoded by the following transcript(s): HUMELAM1A_T5 (SEQ ID NO:11), for which the sequence(s) is/are given at the end of the application. The coding portion of transcript HUMELAM1A_T5 (SEQ ID NO:11) is shown in bold; this coding portion starts at position 164 and ends at position 889. The transcript also has the following SNPs as listed in Table 10 (given according to their position on the nucleotide sequence, with the alternative nucleic acid listed; the last column indicates whether the SNP is known or not; the presence of known SNPs in variant protein HUMELAM1A_P2 (SEQ ID NO:32) Sequence provides support for the deduced sequence of this variant protein according to the present invention).

TABLE 10
Nucleic acid SNPs

| SNP position on nucleotide | | Previously |
|---|---|---|
| sequence | Alternative nucleic acid | known SNP? |
| 43 | A -> G | Yes |
| 65 | A -> G | Yes |
| 145 | G -> T | Yes |
| 224 | G -> T | Yes |
| 256 | G -> T | Yes |
| 436 | A -> G | Yes |
| 439 | A -> G | Yes |
| 553 | C -> G | Yes |
| 608 | A -> C | Yes |

[0440] Variant protein HUMELAM1A_P2 (SEQ ID NO:33) according to the present invention has an amino acid sequence as given at the end of the application; it is encoded by transcript(s) HUMELAM1A_T6 (SEQ ID NO:12). An alignment is given to the known protein (E-selectin precursor (SEQ ID NO:30) at the end of the application. One or more alignments to one or more previously published protein sequences are given at the end of the application. A brief description of the relationship of the variant protein according to the present invention to each such aligned protein is as follows:

[0441] Comparison report between HUMELAM1A_P2 (SEQ ID NO:33) and LEM2_HUMAN (SEQ ID NO:30):

[0442] 1. An isolated chimeric polypeptide encoding for HUMELAM1A_P2 (SEQ ID NO:33), comprising a first amino acid sequence being at least 90% homologous to MIASQFLSALTLVLLIKESGAWSYNTSTEAMTYDEASAYCQQRYTHLVAIQNKEEIEYL NSILSYSPSYYWIGIRKVNNVWVWVGTQKPLTEEAKNWAPGEPNNRQKDEDCVEIYIK REKDVGMWNDERCSKKKLALCYTAACTNTSCSGHGECVETINbYTCKCDPGFSGLKC EQ corresponding to amino acids 1-176 of LEM2_HUMAN (SEQ ID NO:30), which also corresponds to amino acids 1-176 of HUMELAM1A_P2 (SEQ ID NO:33), and a second amino acid sequence being at least 70%, optionally at least 80%, preferably at least 85%, more preferably at least 90% and most preferably at least 95% homologous to a polypeptide having the sequence SKSGSCLFLHLRW (SEQ ID NO:503) corresponding to amino acids 177-189 of HUMELAM1A_P2 (SEQ ID NO:33), wherein said first amino acid sequence and second amino acid sequence are contiguous and in a sequential order.

[0443] 2. An isolated polypeptide encoding for a tail of HUMELAM1A_P2 (SEQ ID NO:33), comprising a polypeptide being at least 70%, optionally at least about 80%, preferably at least about 85%, more preferably at least about 90% and most preferably at least about 95% homologous to the sequence SKSGSCLFLHLRW (SEQ ID NO:503) in HUMELAM1A_P2 (SEQ ID NO:33).

[0444] The location of the variant protein was determined according to results from a number of different software programs and analyses, including analyses from SignalP and other specialized programs. The variant protein is believed to be located as follows with regard to the cell: secreted. The protein localization is believed to be secreted because both signal-peptide prediction programs predict that this protein has a signal peptide, and neither trans-membrane region prediction program predicts that this protein has a trans-membrane region.

[0445] Variant protein HUMELAM1A_P2 (SEQ ID NO:33) also has the following non-silent SNPs (Single Nucleotide Polymorphisms) as listed in Table 11, (given according to their position(s) on the amino acid sequence, with the alternative amino acid(s) listed; the last column indicates whether the SNP is known or not; the presence of known SNPs in variant protein HUMELAM1A_P2 (SEQ ID NO:33) Sequence provides support for the deduced sequence of this variant protein according to the present invention).

TABLE 11
Amino acid mutations

| SNP position(s) on amino acid | | Previously |
|---|---|---|
| sequence | Alternative amino acid(s) | known SNP? |
| 21 | A -> S | Yes |
| 31 | M -> I | Yes |
| 130 | C -> W | Yes |
| 149 | S -> R | Yes |
| 182 | C -> R | Yes |

[0446] The glycosylation sites of variant protein HUMELAM1A_P2 (SEQ ID NO:33), as compared to the known protein E-selectin precursor (SEQ ID NO:30), are described in Table 12 (given according to their position(s) on the amino acid sequence in the first column; the second column indicates whether the glycosylation site is present in the variant protein; and the last column indicates whether the position is different on the variant protein).

TABLE 12
Glycosylation site(s)

| Position(s) on known amino | | Position in |
|---|---|---|
| acid sequence | Present in variant protein? | variant protein? |
| 199 | no | |
| 203 | no | |
| 312 | no | |
| 145 | yes | 145 |
| 332 | no | |
| 503 | no | |
| 265 | no | |
| 160 | yes | 160 |
| 25 | yes | 25 |
| 527 | no | |
| 179 | no | |

[0447] Variant protein HUMELAM1A_P2 (SEQ ID NO:33) is encoded by the following ript(s): HUMELAM1A_T6 (SEQ ID NO:12), for which the sequence(s) is/are given at the end of the application. The coding portion of transcript HUMELAM1A_T6 (SEQ ID NO: 12) is shown in bold; this coding portion starts at position 164 and ends at position 730. The transcript also has the following SNPs as listed in Table 13 (given according to their position on the nucleotide sequence, with the alternative nucleic acid listed; the last column indicates whether the SNP is known or not; the presence of known SNPs in variant protein HUMELAM1A_P2 (SEQ ID NO:33) Sequence provides support for the deduced sequence of this variant protein according to the present invention).

TABLE 13
Nucleic acid SNPs

| SNP position on nucleotide | | Previously |
|---|---|---|
| sequence | Alternative nucleic acid | known SNP? |
| 43 | A -> G | Yes |
| 65 | A -> G | Yes |
| 145 | G -> T | Yes |
| 224 | G -> T | Yes |
| 256 | G -> T | Yes |
| 436 | A -> G | Yes |
| 439 | A -> G | Yes |
| 553 | C -> G | Yes |
| 608 | A -> C | Yes |
| 707 | T -> C | Yes |
| 815 | C -> T | Yes |
| 912 | T -> A | Yes |

[0448] As noted above, cluster HUMELAM1A features 17 segment(s), which were listed in Table 2 above and for which the sequence(s) are given at the end of the application. These segment(s) are portions of nucleic acid sequence(s) which are described herein separately because they are of particular interest. A description of each segment according to the present invention is now provided.

[0449] Segment cluster HUMELAM1A_node_{—}5 (SEQ ID NO:13) according to the present invention is supported by 16 libraries. The number of libraries was determined as previously described. This segment can be found in the following transcript(s): HUMELAM1A_T1 (SEQ ID NO:10), HUMELAM1A_T5 (SEQ ID NO:11) and HUMELAM1A_T6 (SEQ ID NO:12). Table 14 below describes the starting and ending position of this segment on each transcript.

TABLE 14
Segment location on transcripts

| | Segment | |
|---|---|---|
| | starting | Segment |
| Transcript name | position | ending position |
| HUMELAM1A_T1 (SEQ ID NO: 10) | 201 | 584 |
| HUMELAM1A_T5 (SEQ ID NO: 11) | 201 | 584 |
| HUMELAM1A_T6 (SEQ ID NO: 12) | 201 | 584 |

[0450] Segment cluster HUMELAM1A_node_{—}8 (SEQ ID NO:14) according to the present invention is supported by 1 libraries. The number of libraries was determined as previously described. This segment can be found in the following transcript(s): HUMELAM1A_T6 (SEQ ID NO:12). Table 15 below describes the starting and ending position of this segment on each transcript.

TABLE 15
Segment location on transcripts

| | Segment | |
|---|---|---|
| | starting | Segment |
| Transcript name | position | ending position |
| HUMELAM1A_T6 (SEQ ID NO: 12) | 693 | 1061 |

[0451] Segment cluster HUMELAM1A_node_{—}10 (SEQ ID NO:15) according to the present invention is supported by 15 libraries. The number of libraries was determined as previously described. This segment can be found in the following transcript(s): HUMELAM1A_T1 (SEQ ID NO:10) and HUMELAM1A_T5 (SEQ ID NO:11). Table 16 below describes the starting and ending position of this segment on each transcript.

TABLE 16
Segment location on transcripts

| | | Segment |
|---|---|---|
| | Segment | ending |
| Transcript name | starting position | position |
| HUMELAM1A_T1 (SEQ ID NO: 10) | 693 | 878 |
| HUMELAM1A_T5 (SEQ ID NO: 11) | 693 | 878 |

[0452] Segment cluster HUMELAM1A_node_{—}11 (SEQ ID NO:16) according to the present invention is supported by 3 libraries. The number of libraries was determined as previously described. This segment can be found in the following transcript(s): HUMELAM1A_T5 (SEQ ID NO:11). Table 17 below describes the starting and ending position of this segment on each transcript.

TABLE 17
Segment location on transcripts

| | | Segment |
|---|---|---|
| | Segment | ending |
| Transcript name | starting position | position |
| HUMELAM1A_T5 (SEQ ID NO: 11) | 879 | 1150 |

[0453] Segment cluster HUMELAM1A_node_{—}13 (SEQ ID NO:17) according to the present invention is supported by 10 libraries. The number of libraries was determined as previously described. This segment can be found in the following transcript(s): HUMELAM1A_T1 (SEQ ID NO:10). Table 18 below describes the starting and ending position of this segment on each transcript.

TABLE 18
Segment location on transcripts

| | | Segment |
|---|---|---|
| | Segment | ending |
| Transcript name | starting position | position |
| HUMELAM1A_T1 (SEQ ID NO: 10) | 879 | 1064 |

[0454] Segment cluster HUMELAM1A_node_{—}15 (SEQ ID NO:18) according to the present invention is supported by 10 libraries. The number of libraries was determined as previously described. This segment can be found in the following transcript(s): HUMELAM1A_T1 (SEQ ID NO:10). Table 19 below describes the starting and ending position of this segment on each transcript.

TABLE 19
Segment location on transcripts

| | | Segment |
|---|---|---|
| | Segment | ending |
| Transcript name | starting position | position |
| HUMELAM1A_T1 (SEQ ID NO: 10) | 1065 | 1253 |

[0455] Segment cluster HUMELAM1A_node_{—}18 (SEQ ID NO:19) according to the present invention is supported by 14 libraries. The number of libraries was determined as previously described. This segment can be found in the following transcript(s): HUMELAM1A_T1 (SEE ID NO:10). Table 20 below describes the starting and ending position of this segment on each transcript.

TABLE 20
Segment location on transcripts

| | | Segment |
|---|---|---|
| | Segment | ending |
| Transcript name | starting position | position |
| HUMELAM1A_T1 (SEQ ID NO: 10) | 1254 | 1442 |

[0456] Segment cluster HUMELAM1A_node_{—}19 (SEQ ID NO:20) according to the present invention is supported by 4 libraries. The number of libraries was determined as previously described. This segment can be found in the following transcript(s): HUMELAM1A_T1 (SEQ ID NO:10). Table 21 below describes the starting and ending position of this segment on each transcript.

TABLE 21
Segment location on transcripts

| | | Segment |
|---|---|---|
| | Segment | ending |
| Transcript name | starting position | position |
| HUMELAM1A_T1 (SEQ ID NO: 10) | 1443 | 1572 |

[0457] Segment cluster HUMELAM1A_node_{—}20 (SEQ ID NO:21) according to the present invention is supported by 10 libraries. The number of libraries was determined as previously described. This segment can be found in the following transcript(s): HUMELAM1A_T1 (SEQ ID NO:10). Table 22 below describes the starting and ending position of this segment on each transcript.

TABLE 22
Segment location on transcripts

| | | Segment |
|---|---|---|
| | Segment | ending |
| Transcript name | starting position | position |
| HUMELAM1A_T1 (SEQ ID NO: 10) | 1573 | 1761 |

[0458] Segment cluster HUMELAM1A_node_{—}22 (SEQ ID NO:22) according to the present invention is supported by 10 libraries. The number of libraries was determined as previously described. This segment can be found in the following transcript(s): HUMELAM1A_T1 (SEQ ID NO:10). Table 23 below describes the starting and ending position of this segment on each transcript.

TABLE 23
Segment location on transcripts

| | | Segment |
|---|---|---|
| | Segment | ending |
| Transcript name | starting position | position |
| HUMELAM1A_T1 (SEQ ID NO: 10) | 1762 | 1938 |

[0459] Segment cluster HUMELAM1A_node_{—}33 (SEQ ID NO:23) according to the present invention is supported by 50 libraries. The number of libraries was determined as previously described. This segment can be found in the following transcript(s): HUMELAM1A_T1 (SEQ ID NO:10). Table 24 below describes the starting and ending position of this segment on each transcript.

TABLE 24
Segment location on transcripts

| | | Segment |
|---|---|---|
| | Segment | ending |
| Transcript name | starting position | position |
| HUMELAM1A_T1 (SEQ ID NO: 10) | 2142 | 4016 |

[0460] According to an optional embodiment of the present invention, short segments related to the above cluster are also provided. These segments are up to about 120 bp in length, and so are included in a separate description.

[0461] Segment cluster HUMELAM1A_node_{—}0 (SEQ ID NO:24) according to the present invention is supported by 14 libraries. The number of libraries was determined as previously described. This segment can be found in the following transcript(s): HUMELAM1A_T1 (SEQ ID NO:10), HUMELAM1A_T5 (SEQ ID NO:11 and HUMELAM1A_T6 (SEQ ID NO:12). Table 25 below describes the starting and ending position of this segment on each transcript.

TABLE 25
Segment location on transcripts

| | | Segment |
|---|---|---|
| | Segment | ending |
| Transcript name | starting position | position |
| HUMELAM1A_T1 (SEQ ID NO: 10) | 1 | 115 |
| HUMELAM1A_T5 (SEQ ID NO: 11) | 1 | 115 |
| HUMELAM1A_T6 (SEQ ID NO: 12) | 1 | 115 |

[0462] Segment cluster HUMELAM1A_node_{—}2 (SEQ ID NO:25) according to the present invention is supported by 15 libraries. The number of libraries was determined as previously described. This segment can be found in the following transcript(s): HUMELAM1A_T1 (SEQ ID NO:10), HUMELAM1A_T5 (SEQ ID NO:11) and HUMELAM1A_T6 (SEQ ID NO:12). Table 26 below describes the starting and ending position of this segment on each transcript.

TABLE 26
Segment location on transcripts

| | Segment | |
|---|---|---|
| | starting | Segment |
| Transcript name | position | ending position |
| HUMELAM1A_T1 (SEQ ID NO: 10) | 116 | 200 |
| HUMELAM1A_T5 (SEQ ID NO: 11) | 116 | 200 |
| HUMELAM1A_T6 (SEQ ID NO: 12) | 116 | 200 |

[0463] Segment cluster HUMELAM1A_node_{—}7 (SEQ ID NO:26) according to the present invention is supported by 13 libraries. The number of libraries was determined as previously described. This segment can be found in the following transcript(s): HUMELAM1A_T1 (SEQ ID NO:10), HUMELAM1A_T5 (SEQ ID NO:1) and HUMELAM1A_T6 (SEQ ID NO:12). Table 27 below describes the starting and ending position of this segment on each transcript.

TABLE 27
Segment location on transcripts

| | Segment | |
|---|---|---|
| | starting | Segment |
| Transcript name | position | ending position |
| HUMELAM1A_T1 (SEQ ID NO: 10) | 585 | 692 |
| HUMELAM1A_T5 (SEQ ID NO: 11) | 585 | 692 |
| HUMELAM1A_T6 (SEQ ID NO: 12) | 585 | 692 |

[0464] Segment cluster HUMELAM1A_node_{—}24 (SEQ ID NO:27) according to the present invention is supported by 5 libraries. The number of libraries was determined as previously described. This segment can be found in the following transcript(s): HUMELAM1A_T1 (SEQ ID NO:11). Table 28 below describes the starting and ending position of this segment on each transcript.

TABLE 28
Segment location on transcripts

| | Segment | |
|---|---|---|
| | starting | Segment |
| Transcript name | position | ending position |
| HUMELAM1A_T1 (SEQ ID NO: 10) | 1939 | 2046 |

[0465] Segment cluster HUMELAM1A_node_{—}26 (SEQ ID NO:28) according to the present invention can be found in the following transcript(s): HUMELAM1A_T1 (SEQ ID NO:10). Table 29 below describes the starting and ending position of this segment on each transcript.

TABLE 29
Segment location on transcripts

| | Segment | |
|---|---|---|
| | starting | Segment |
| Transcript name | position | ending position |
| HUMELAM1A_T1 (SEQ ID NO: 10) | 2047 | 2068 |

[0466] Segment cluster HUMELAM1A_node_{—}29 (SEQ ID NO:29) according to the present invention is supported by 8 libraries. The number of libraries was determined as previously described. This segment can be found in the following transcript(s): HUMELAM1A_T1 (SEQ ID NO:10). Table 30 below describes the starting and ending position of this segment on each transcript.

TABLE 30
Segment location on transcripts

| | Segment | |
|---|---|---|
| | starting | Segment |
| Transcript name | position | ending position |
| HUMELAM1A_T1 (SEQ ID NO: 10) | 2069 | 2141 |

[0467] Variant protein alignment to the previously known protein:

| Sequence name: LEM2_HUMAN (SEQ ID NO: 30) | | | |
|---|---|---|---|
| Sequence documentation: | | | |
| Alignment of: HUMELAM1A_P2 (SEQ ID NO: 31) × LEM2_HUMAN (SEQ ID NO: 30) .. | | | |
| Alignment segment 1/1: | | | |
| Quality: | 4376.00 | Escore: | 0 |
| Matching length: | 426 | Total length: | 426 |
| Matching Percent Similarity: | 100.00 | Matching Percent Identity: | 100.00 |
| Total Percent Similarity: | 100.00 | Total Percent Identity: | 100.00 |
| Gaps: | 0 | | |

| Alignment: | | |
|---|---|---|
| | . . . . . | |
| 1 | MIASQFLSALTLVLLIKESGAWSYNTSTEAMTYDEASAYCQQRYTHLVAI | 50 |
| | \|\|\|\|\|\|\|\|\|\|\|\|\|\|\|\|\|\|\|\|\|\|\|\|\|\|\|\|\|\|\|\|\|\|\|\|\|\|\|\|\|\|\|\|\|\|\|\|\|\| | |
| 1 | MIASQFLSALTLVLLIKESGAWSYNTSTEAMTYDEASAYCQQRYTHLVAI | 50 |
| | . . . . . | |
| 51 | QNKEEIEYLNSILSYSPSYYWIGIRKVNNVWVWVGTQKPLTEEAKNWAPG | 100 |
| | \|\|\|\|\|\|\|\|\|\|\|\|\|\|\|\|\|\|\|\|\|\|\|\|\|\|\|\|\|\|\|\|\|\|\|\|\|\|\|\|\|\|\|\|\|\|\|\|\|\| | |
| 51 | QNKEEIEYLNSILSYSPSYYWIGIRKVNNVWVWVGTQKPLTEEAKNWAPG | 100 |
| | . . . . . | |
| 101 | EPNNRQKDEDCVEIYIKREKDVGMWNDERCSKKKLALCYTAACTNTSCSG | 150 |
| | \|\|\|\|\|\|\|\|\|\|\|\|\|\|\|\|\|\|\|\|\|\|\|\|\|\|\|\|\|\|\|\|\|\|\|\|\|\|\|\|\|\|\|\|\|\|\|\|\|\| | |
| 101 | EPNNRQKDEDCVEIYIKREKDVGMWNDERCSKKKLALCYTAACTNTSCSG | 150 |
| | . . . . . | |
| 151 | HGECVETINNYTCKCDPGFSGLKCEQIVNCTALESPEHGSLVCSHPLGNF | 200 |
| | \|\|\|\|\|\|\|\|\|\|\|\|\|\|\|\|\|\|\|\|\|\|\|\|\|\|\|\|\|\|\|\|\|\|\|\|\|\|\|\|\|\|\|\|\|\|\|\|\|\| | |
| 151 | HGECVETINNYTCKCDPGFSGLKCEQIVNCTALESPEHGSLVCSHPLGNF | 200 |
| | . . . . . | |
| 201 | SYNSSCSISCDRGYLPSSMETMQCMSSGEWSAPIPACNVVECDAVTNPAN | 250 |
| | \|\|\|\|\|\|\|\|\|\|\|\|\|\|\|\|\|\|\|\|\|\|\|\|\|\|\|\|\|\|\|\|\|\|\|\|\|\|\|\|\|\|\|\|\|\|\|\|\|\| | |
| 201 | SYNSSCSISCDRGYLPSSMETMQCMSSGEWSAPIPACNVVECDAVTNPAN | 250 |
| | . . . . . | |
| 251 | GFVECFQNPGSFPWNTTCTFDCEEGFELMGAQSLQCTSSGNWDNEKPTCK | 300 |
| | \|\|\|\|\|\|\|\|\|\|\|\|\|\|\|\|\|\|\|\|\|\|\|\|\|\|\|\|\|\|\|\|\|\|\|\|\|\|\|\|\|\|\|\|\|\|\|\|\|\| | |
| 251 | GFVECFQNPGSFPWNTTCTFDCEEGFELMGAQSLQCTSSGNWDNEKPTCK | 300 |
| | . . . . . | |
| 301 | AVTCRAVRQPQNGSVRCSHSPAGEFTFKSSCNFTCEEGFMLQGPAQVECT | 350 |
| | \|\|\|\|\|\|\|\|\|\|\|\|\|\|\|\|\|\|\|\|\|\|\|\|\|\|\|\|\|\|\|\|\|\|\|\|\|\|\|\|\|\|\|\|\|\|\|\|\|\| | |
| 301 | AVTCRAVRQPQNGSVRCSHSPAGEFTFKSSCNFTCEEGFMLQGPAQVECT | 350 |
| | . . . . . | |
| 351 | TQGQWTQQIPVCEAFQCTALSNPERGYMNCLPSASGSFRYGSSCEFSCEQ | 400 |
| | \|\|\|\|\|\|\|\|\|\|\|\|\|\|\|\|\|\|\|\|\|\|\|\|\|\|\|\|\|\|\|\|\|\|\|\|\|\|\|\|\|\|\|\|\|\|\|\|\|\| | |
| 351 | TQGQWTQQIPVCEAFQCTALSNPERGYMNCLPSASGSFRYGSSCEFSCEQ | 400 |
| | . . | |
| 401 | GFVLKGSKRLQGGPTGEWDNEKPTCE | 426 |
| | \|\|\|\|\|\|\|\|\|\|\|\|\|\|\|\|\|\|\|\|\|\|\|\|\|\| | |
| 401 | GFVLKGSKRLQCGPTGEWDNEKPTCE | 426 |

| Sequence name: LEM2_HUMAN (SEQ ID NO: 30) | | | |
|---|---|---|---|
| Sequence documentation: | | | |
| Alignment of: HUMELAM1A_P2 (SEQ ID NO: 32) × LEM2_HUMAN (SEQ ID NO: 30) .. | | | |
| Alignment segment 1/1: | | | |
| Quality: | 2426.00 | Escore: | 0 |
| Matching length: | 238 | Total length: | 238 |
| Matching Percent Similarity: | 100.00 | Matching Percent Identity: | 100.00 |
| Total Percent Similarity: | 100.00 | Total Percent Identity: | 100.00 |
| Gaps: | 0 | | |

| Alignment: | | |
|---|---|---|
| | . . . . . | |
| 1 | MIASQFLSALTLVLLIKESGAWSYNTSTEAMTYDEASAYCQQRYTHLVAI | 50 |
| | \|\|\|\|\|\|\|\|\|\|\|\|\|\|\|\|\|\|\|\|\|\|\|\|\|\|\|\|\|\|\|\|\|\|\|\|\|\|\|\|\|\|\|\|\|\|\|\|\|\| | |
| 1 | MIASQFLSALTLVLLIKESGAWSYNTSTEANTYDEASAYCQQRYTHLVAI | 50 |
| | . . . . . | |
| 51 | QNKEEIEYLNSILSYSPSYYWIGIRKVNNVWVWVGTQKPLTEEAKNWAPG | 100 |
| | \|\|\|\|\|\|\|\|\|\|\|\|\|\|\|\|\|\|\|\|\|\|\|\|\|\|\|\|\|\|\|\|\|\|\|\|\|\|\|\|\|\|\|\|\|\|\|\|\|\| | |
| 51 | QNKEEIEYLNSILSYSPSYYWIGIRKVNNVWVWVGTQKPLTEEAKNWAPG | 100 |
| | . . . . . | |
| 101 | EPNNRQKDEDCVEIYIKREKDVGMWNDERCSKKKLALCYTAACTNTSCSG | 150 |
| | \|\|\|\|\|\|\|\|\|\|\|\|\|\|\|\|\|\|\|\|\|\|\|\|\|\|\|\|\|\|\|\|\|\|\|\|\|\|\|\|\|\|\|\|\|\|\|\|\|\| | |
| 101 | EPNNRQKDEDCVEIYIKREKDVGMWNDERCSKKKLALCYTAACTNTSCSG | 150 |
| | . . . . . | |
| 151 | HGECVETINNYTCKCDPGFSGLKCEQIVNCTALESPEHGSLVCSHPLGNF | 200 |
| | \|\|\|\|\|\|\|\|\|\|\|\|\|\|\|\|\|\|\|\|\|\|\|\|\|\|\|\|\|\|\|\|\|\|\|\|\|\|\|\|\|\|\|\|\|\|\|\|\|\| | |
| 151 | HGECVETINNYTCKCDPGFSGLKCEQIVNCTALESPEHGSLVCSHPLGNF | 200 |
| | . . . | |
| 201 | SYNSSCSISCDRGYLPSSMETMQCMSSGEWSAPIPACN | 238 |
| | \|\|\|\|\|\|\|\|\|\|\|\|\|\|\|\|\|\|\|\|\|\|\|\|\|\|\|\|\|\|\|\|\|\|\|\|\|\| | |
| 201 | SYNSSCSISCDRGYLPSSMETMQCMSSGEWSAPIPACN | 238 |

| Sequence name: LEM2_HUMAN | | | |
|---|---|---|---|
| Sequence documentation: | | | |
| Alignment of: HUMELAM1A_P2 (SEQ ID NO: 33) × LEM2_HUMAN (SEQ ID NO: 30) .. | | | |
| Alignment segment 1/1: | | | |
| Quality: | 1786.00 | Escore: | 0 |
| Matching length: | 176 | Total length: | 176 |
| Matching Percent Similarity: | 100.00 | Matching Percent Identity: | 100.00 |
| Total Percent Similarity: | 100.00 | Total Percent Identity: | 100.00 |
| Gaps: | 0 | | |

| Alignment: | | |
|---|---|---|
| | . . . . . | |
| 1 | MIASQFLSALTLVLLIKESGAWSYNTSTEAMTYDEASAYCQQRYTHLVAI | 50 |
| | \|\|\|\|\|\|\|\|\|\|\|\|\|\|\|\|\|\|\|\|\|\|\|\|\|\|\|\|\|\|\|\|\|\|\|\|\|\|\|\|\|\|\|\|\|\|\|\|\|\| | |
| 1 | MIASQFLSALTLVLLIKESGAWSYNTSTEAMTYDEASAYCQQRYTHLVAI | 50 |
| | . . . . . | |
| 51 | QNKEEIEYLNSILSYSPSYYWIGIRKVNNVWVWVGTQKPLTEEAKNWAPG | 100 |
| | \|\|\|\|\|\|\|\|\|\|\|\|\|\|\|\|\|\|\|\|\|\|\|\|\|\|\|\|\|\|\|\|\|\|\|\|\|\|\|\|\|\|\|\|\|\|\|\|\|\| | |
| 51 | QNKEEIEYLNSILSYSPSYYWIGIRKVNNVWVWVGTQKPLTEEAKNWAPG | 100 |
| | . . . . . | |
| 101 | EPNNRQKDEDCVEIYIKREKDVGMWNDERCSKKKLALCYTAACTNTSCSG | 150 |
| | \|\|\|\|\|\|\|\|\|\|\|\|\|\|\|\|\|\|\|\|\|\|\|\|\|\|\|\|\|\|\|\|\|\|\|\|\|\|\|\|\|\|\|\|\|\|\|\|\|\| | |
| 101 | EPNNRQKDEDCVEIYIKREKDVGMWNDERCSKKKLALCYTAACTNTSCSG | 150 |
| | . . | |
| 151 | HGECVETINNYTCKCDPGFSGLKCEQ | 176 |
| | \|\|\|\|\|\|\|\|\|\|\|\|\|\|\|\|\|\|\|\|\|\|\|\|\|\| | |
| 151 | HGECVETINNYTCKCDPGFSGLKCEQ | 176 |

### Description for Cluster HUMHPA1B

[0468] Cluster HUMHPA1B features 13 transcript(s) and 84 segment(s) of interest, the names for which are given in Tables 1 and 2, respectively, the sequences themselves are given at the end of the application. The selected protein variants are given in table 3.

TABLE 1
Transcripts of interest

| Transcript Name | Sequence ID No. |
|---|---|
| HUMHPA1B_PEA_1_T1 | 34 |
| HUMHPA1B_PEA_1_T4 | 35 |
| HUMHPA1B_PEA_1_T6 | 36 |
| HUMHPA1B_PEA_1_T7 | 37 |
| HUMHPA1B_PEA_1_T12 | 38 |
| HUMHPA1B_PEA_1_T16 | 39 |
| HUMHPA1B_PEA_1_T19 | 40 |
| HUMHPA1B_PEA_1_T20 | 41 |
| HUMHPA1B_PEA_1_T27 | 42 |
| HUMHPA1B_PEA_1_T29 | 43 |
| HUMHPA1B_PEA_1_T55 | 44 |
| HUMHPA1B_PEA_1_T56 | 45 |
| HUMHPA1B_PEA_1_T59 | 46 |

[0469] TABLE 2
Segments of interest

| Segment Name | Sequence ID No. |
|---|---|
| HUMHPA1B_PEA_1_node_20 | 47 |
| HUMHPA1B_PEA_1_node_25 | 48 |
| HUMHPA1B_PEA_1_node_28 | 49 |
| HUMHPA1B_PEA_1_node_35 | 50 |
| HUMHPA1B_PEA_1_node_88 | 51 |
| HUMHPA1B_PEA_1_node_0 | 52 |
| HUMHPA1B_PEA_1_node_1 | 53 |
| HUMHPA1B_PEA_1_node_3 | 54 |
| HUMHPA1B_PEA_1_node_4 | 55 |
| HUMHPA1B_PEA_1_node_5 | 56 |
| HUMHPA1B_PEA_1_node_6 | 57 |
| HUMHPA1B_PEA_1_node_7 | 58 |
| HUMHPA1B_PEA_1_node_10 | 59 |
| HUMHPA1B_PEA_1_node_11 | 60 |
| HUMHPA1B_PEA_1_node_12 | 61 |
| HUMHPA1B_PEA_1_node_13 | 62 |
| HUMHPA1B_PEA_1_node_14 | 63 |
| HUMHPA1B_PEA_1_node_15 | 64 |
| HUMHPA1B_PEA_1_node_16 | 65 |
| HUMHPA1B_PEA_1_node_17 | 66 |
| HUMHPA1B_PEA_1_node_18 | 67 |
| HUMHPA1B_PEA_1_node_19 | 68 |
| HUMHPA1B_PEA_1_node_21 | 69 |
| HUMHPA1B_PEA_1_node_22 | 70 |
| HUMHPA1B_PEA_1_node_23 | 71 |
| HUMHPA1B_PEA_1_node_24 | 72 |
| HUMHPA1B_PEA_1_node_27 | 73 |
| HUMHPA1B_PEA_1_node_29 | 74 |
| HUMHPA1B_PEA_1_node_30 | 75 |
| HUMHPA1B_PEA_1_node_31 | 76 |
| HUMHPA1B_PEA_1_node_32 | 77 |
| HUMHPA1B_PEA_1_node_33 | 78 |
| HUMHPA1B_PEA_1_node_34 | 79 |
| HUMHPA1B_PEA_1_node_36 | 80 |
| HUMHPA1B_PEA_1_node_37 | 81 |
| HUMHPA1B_PEA_1_node_38 | 82 |
| HUMHPA1B_PEA_1_node_39 | 83 |
| HUMHPA1B_PEA_1_node_40 | 84 |
| HUMHPA1B_PEA_1_node_41 | 85 |
| HUMHPA1B_PEA_1_node_42 | 86 |
| HUMHPA1B_PEA_1_node_43 | 87 |
| HUMHPA1B_PEA_1_node_44 | 88 |
| HUMHPA1B_PEA_1_node_45 | 89 |
| HUMHPA1B_PEA_1_node_46 | 90 |
| HUMHPA1B_PEA_1_node_47 | 91 |
| HUMHPA1B_PEA_1_node_48 | 92 |
| HUMHPA1B_PEA_1_node_49 | 93 |
| HUMHPA1B_PEA_1_node_50 | 94 |
| HUMHPA1B_PEA_1_node_51 | 95 |
| HUMHPA1B_PEA_1_node_52 | 96 |
| HUMHPA1B_PEA_1_node_53 | 97 |
| HUMHPA1B_PEA_1_node_54 | 98 |
| HUMHPA1B_PEA_1_node_55 | 99 |
| HUMHPA1B_PEA_1_node_56 | 100 |
| HUMHPA1B_PEA_1_node_57 | 101 |
| HUMHPA1B_PEA_1_node_58 | 102 |
| HUMHPA1B_PEA_1_node_59 | 103 |
| HUMHPA1B_PEA_1_node_60 | 104 |
| HUMHPA1B_PEA_1_node_61 | 105 |
| HUMHPA1B_PEA_1_node_62 | 106 |
| HUMHPA1B_PEA_1_node_63 | 107 |
| HUMHPA1B_PEA_1_node_64 | 108 |
| HUMHPA1B_PEA_1_node_65 | 109 |
| HUMHPA1B_PEA_1_node_66 | 110 |
| HUMHPA1B_PEA_1_node_67 | 111 |
| HUMHPA1B_PEA_1_node_69 | 112 |
| HUMHPA1B_PEA_1_node_70 | 113 |
| HUMHPA1B_PEA_1_node_71 | 114 |
| HUMHPA1B_PEA_1_node_72 | 115 |
| HUMHPA1B_PEA_1_node_73 | 116 |
| HUMHPA1B_PEA_1_node_74 | 117 |
| HUMHPA1B_PEA_1_node_75 | 118 |
| HUMHPA1B_PEA_1_node_76 | 119 |
| HUMHPA1B_PEA_1_node_77 | 120 |
| HUMHPA1B_PEA_1_node_78 | 121 |
| HUMHPA1B_PEA_1_node_79 | 122 |
| HUMHPA1B_PEA_1_node_80 | 123 |
| HUMHPA1B_PEA_1_node_81 | 124 |
| HUMHPA1B_PEA_1_node_82 | 125 |
| HUMHPA1B_PEA_1_node_83 | 126 |
| HUMHPA1B_PEA_1_node_84 | 127 |
| HUMHPA1B_PEA_1_node_85 | 128 |
| HUMHPA1B_PEA_1_node_86 | 129 |
| HUMHPA1B_PEA_1_node_87 | 130 |

[0470] TABLE 3
Proteins of interest

| | Sequence | |
|---|---|---|
| Protein Name | ID No. | Corresponding Transcript(s) |
| HUMHPA1B_PEA_1_P61 | 133 | HUMHPA1B_PEA_1_T1 |
| | | (SEQ ID NO: 34) |
| HUMHPA1B_PEA_1_P62 | 134 | HUMHPA1B_PEA_1_T4 |
| | | (SEQ ID NO: 35) |
| HUMHPA1B_PEA_1_P64 | 135 | HUMHPA1B_PEA_1_T6 |
| | | (SEQ ID NO: 36) |
| HUMHPA1B_PEA_1_P65 | 136 | HUMHPA1B_PEA_1_T7 |
| | | (SEQ ID NO: 37) |
| HUMHPA1B_PEA_1_P68 | 137 | HUMHPA1B_PEA_1_T12 |
| | | (SEQ ID NO: 38) |
| HUMHPA1B_PEA_1_P72 | 138 | HUMHPA1B_PEA_1_T16 |
| | | (SEQ ID NO: 39) |
| HUMHPA1B_PEA_1_P75 | 139 | HUMHPA1B_PEA_1_T19 |
| | | (SEQ ID NO: 40) |
| HUMHPA1B_PEA_1_P76 | 140 | HUMHPA1B_PEA_1_T20 |
| | | (SEQ ID NO: 41) |
| HUMHPA1B_PEA_1_P81 | 141 | HUMHPA1B_PEA_1_T27 |
| | | (SEQ ID NO: 42) |
| HUMHPA1B_PEA_1_P83 | 142 | HUMHPA1B_PEA_1_T29 |
| | | (SEQ ID NO: 43) |
| HUMHPA1B_PEA_1_P106 | 143 | HUMHPA1B_PEA_1_T55 |
| | | (SEQ ID NO: 44) |
| HUMHPA1B_PEA_1_P107 | 144 | HUMHPA1B_PEA_1_T56 |
| | | (SEQ ID NO: 45) |
| HUMHPA1B_PEA_1_P115 | 145 | HUMHPA1B_PEA_1_T59 |
| | | (SEQ ID NO: 46) |

[0471] These sequences are variants of the known protein Haptoglobin precursor (SEQ ID NO:131) (SwissProt accession identifier HPT_HUMAN), referred to herein as the previously known protein.

[0472] Protein Haptoglobin precursor (SEQ ID NO:131) is known or believed to have the following function(s): haptoglobin combines with free plasma hemoglobin, preventing loss of iron through the kidneys and protecting the kidneys from damage by hemoglobin, while making the hemoglobin accessible to degradative enzymes. The sequence for protein Haptoglobin precursor is given at the end of the application, as “Haptoglobin precursor amino acid sequence” (SEQ ID NO:131). Known polymorphisms for this sequence are as shown in Table 4.

TABLE 4
Amino acid mutations for Known Protein

| SNP position(s) on | |
|---|---|
| amino acid sequence | Comment |
| 29-87 | Missing (in allele HP*1F and allele HP*1S). |
| | /FTId = VAR_017112. |
| 193 | N -> D (in allele HP*1F). /FTId = VAR_005294. |
| 194 | E -> K (in allele HP*1F). /FTId = VAR_017113. |
| 397 | D -> H (in dbSNP: 12646). /FTId = VAR_017114. |
| 70 | D -> N |
| 90 | D -> E |

[0473] Protein Haptoglobin precursor (SEQ ID NO:131) localization is believed to be Secreted.

[0474] Endometriotic lesions synthesize and secrete a unique form of haptoglobin (endometriosis protein-I) that is up-regulated by IL-6 (Sharpe-Timms et al, Fertil Steril. 2002 October; 78(4):810-9). Variants of this cluster are suitable as diagnostic markers for endometriosis.

[0475] The following GO Annotation(s) apply to the previously known protein. The following annotation(s) were found: defense response, which are annotation(s) related to Biological Process.

[0476] The GO assignment relies on information from one or more of the SwissProt/TremBl Protein knowledgebase, available from <http://www.expasy.ch/sprot/>; or Locuslink, available from <http://www.ncbi.nlm.nih.gov/projects/LocusLink/>.

[0477] As noted above, cluster HUMHPA1B features 13 transcript(s), which were listed in Table 1 above. These transcript(s) encode for protein(s) which are variant(s) of protein Haptoglobin precursor (SEQ ID NO:131). A description of each variant protein according to the present invention is now provided.

[0478] Variant protein HUMHPA1B_PEA_{—}1_P61 (SEQ ID NO:133) according to the present invention has an amino acid sequence as given at the end of the application; it is encoded by transcript(s) HUMHPA1B_PEA_{—}1_T1 (SEQ ID NO:34). An alignment is given to the known protein (Haptoglobin precursor (SEQ ID NO:131)) at the end of the application. One or more alignments to one or more previously published protein sequences are given at the end of the application. A brief description of the relationship of the variant protein according to the present invention to each such aligned protein is as follows:

[0479] Comparison report between HUMHPA1B_PEA_{—}1_P61 (SEQ ID NO:133) and HPT_HUMAN (SEQ ID NO:131):

[0480] 1. An isolated chimeric polypeptide encoding for HUMHPA1B_PEA_{—}1_P61 (SEQ ID NO:133), comprising a first amino acid sequence being at least 90% homologous to MSALGAVIALLLWGQLFAVDSGNDVTDI corresponding to amino acids 1-28 of HPT_HUMAN (SEQ ID NO:131), which also corresponds to amino acids 1-28 of HUMHPA1B_PEA_{—}1_P61 (SEQ ID NO:133), and a second amino acid sequence being at least 90% homologous to ADDGCPKPPEIAHGYVEHSVRYQCKNYYKLRTEGDGVYTLNNEKQWINKAVGDKLPE CEAVCGKPKNPANPVQRILGGHLDAKGSFPWQAKMVSHHNLTTGATLINEQWLLTTA KNLFLNHSENATAKDIAPTLTLYVGKKQLVEIEKVVLHPNYSQVDIGLIKLKQKVSVNE RVMPICLPSKDYAEVGRVGYVSGWGRNANFKFTDHLKYVMLPVADQDQCIRHYEGST VPEKKTPKSPVGVQPILNEHTFCAGMSKYQEDTCYGDAGSAFAVHDLEEDTWYATGIL SFDKSCAVAEYGVYVKVTSIQDWVQKTIAEN corresponding to amino acids 88-406 of HPT_HUMAN (SEQ ID NO:131), which also corresponds to amino acids 29-347 of HUMHPA1B_PEA_{—}1_P61 (SEQ ID NO:133), wherein said first amino acid sequence and second amino acid sequence are contiguous and in a sequential order.

[0481] 2. An isolated chimeric polypeptide encoding for an edge portion of HUMHPA1B_PEA_{—}1_P61 (SEQ ID NO:133), comprising a polypeptide having a length “n”, wherein n is at least about 10 amino acids in length, optionally at least about 20 amino acids in length, preferably at least about 30 amino acids in length, more preferably at least about 40 amino acids in length and most preferably at least about 50 amino acids in length, wherein at least two amino acids comprise IA, having a structure as follows: a sequence starting from any of amino acid numbers 28−x to 28; and ending at any of amino acid numbers 29+((n−2)−x), in which x varies from 0 to n−2.

[0482] The location of the variant protein was determined according to results from a number of different software programs and analyses, including analyses from SignalP and other specialized programs. The variant protein is believed to be located as follows with regard to the cell: secreted. The protein localization is believed to be secreted because both signal-peptide prediction programs predict that this protein has a signal peptide, and neither trans-membrane region prediction program predicts that this protein has a trans-membrane region.

[0483] Variant protein HUMHPA1B_PEA_{—}1_P61 (SEQ ID NO:133) also has the following non-silent SNPs (Single Nucleotide Polymorphisms) as listed in Table 7, (given according to their position(s) on the amino acid sequence, with the alternative amino acid(s) listed; the last column indicates whether the SNP is known or not; the presence of known SNPs in variant protein HUMHPA1B_PEA_{—}1_P61 (SEQ ID NO:133) Sequence provides support for the deduced sequence of this variant protein according to the present invention).

TABLE 7
Amino acid mutations

| SNP position(s) on amino acid | | Previously |
|---|---|---|
| sequence | Alternative amino acid(s) | known SNP? |
| 8 | I -> | No |
| 38 | E -> D | No |
| 71 | E -> G | No |
| 71 | E -> K | No |
| 108 | L -> V | No |
| 136 | Q -> | No |
| 162 | L -> V | No |
| 176 | K -> | No |
| 184 | S -> P | Yes |
| 194 | K -> | No |
| 242 | L -> P | No |
| 260 | P -> L | No |
| 296 | A -> | No |

[0484] The glycosylation sites of variant protein HUMHPA1B_PEA_{—}1_P61 (SEQ ID NO:133), as compared to the known protein Haptoglobin precursor (SEQ ID NO:131), are described in Table 8 (given according to their position(s) on the amino acid sequence in the first column; the second column indicates whether the glycosylation site is present in the variant protein; and the last column indicates whether the position is different on the variant protein).

TABLE 8
Glycosylation site(s)

| Position(s) on known amino | | Position in |
|---|---|---|
| acid sequence | Present in variant protein? | variant protein? |
| 207 | yes | 148 |
| 241 | yes | 182 |
| 184 | yes | 125 |
| 211 | yes | 152 |

[0485] Variant protein HUMHPA1B_PEA_{—}1_P61 (SEQ ID NO:133) is encoded by the following transcript(s): HUMHPA1B_PEA_{—}1_T1 (SEQ ID NO:34), for which the sequence(s) is/are given at the end of the application. The coding portion of transcript HUMHPA1B_PEA_{—}1_T1 (SEQ ID NO:34) is shown in bold; this coding portion starts at position 68 and ends at position 1108. The transcript also has the following SNPs as listed in Table 9 (given according to their position on the nucleotide sequence, with the alternative nucleic acid listed; the last column indicates whether the SNP is known or not; the presence of known SNPs in variant protein HUMHPA11B_PEA_{—}1_P61 (SEQ ID NO:133) Sequence provides support for the deduced sequence of this variant protein according to the present invention).

TABLE 9
Nucleic acid SNPs

| SNP position on nucleotide | | Previously |
|---|---|---|
| sequence | Alternative nucleic acid | known SNP? |
| 40 | T -> G | No |
| 77 | C -> T | No |
| 90 | T -> | No |
| 181 | G -> T | No |
| 262 | G -> A | Yes |
| 278 | G -> A | No |
| 279 | A -> G | No |
| 304 | -> G | No |
| 337 | -> G | No |
| 389 | C -> G | No |
| 454 | T -> C | Yes |
| 454 | T -> G | Yes |
| 474 | A -> | No |
| 547 | T -> C | No |
| 550 | -> G | No |
| 551 | T -> G | No |
| 589 | T -> C | No |
| 595 | G -> | No |
| 617 | T -> C | Yes |
| 622 | G -> A | No |
| 647 | A -> | No |
| 694 | T -> A | No |
| 792 | T -> C | No |
| 826 | T -> C | No |
| 846 | C -> T | No |
| 886 | -> C | No |
| 913 | T -> C | No |
| 929 | -> C | No |
| 955 | G -> | No |
| 955 | G -> C | No |
| 978 | -> C | No |
| 993 | -> C | No |
| 1074 | -> C | No |
| 1141 | A -> C | No |
| 1142 | A -> G | No |
| 1235 | -> G | No |
| 1235 | -> T | No |

[0486] Variant protein HUMHPA1B_PEA_{—}1_P62 (SEQ ID NO:134) according to the present invention has an amino acid sequence as given at the end of the application; it is encoded by transcript(s) HUMHPA1B_PEA_{—}1_T4 (SEQ ID NO:35). An alignment is given to the known protein (Haptoglobin precursor (SEQ ID NO:131)) at the end of the application. One or more alignments to one or more previously published protein sequences are given at the end of the application. A brief description of the relationship of the variant protein according to the present invention to each such aligned protein is as follows:

[0487] Comparison report between HUMHPA1B_PEA_{—}1_P62 (SEQ ID NO:134) and HPT_HUMAN (SEQ ID NO:131):

[0488] 1. An isolated chimeric polypeptide encoding for HUMHPA1B_PEA_{—}1_P62 (SEQ ID NO:134), comprising a first amino acid sequence being at least 90% homologous to MSALGAVIALLLWGQLFAVDSGNDVTDIADDGCPKPPEIAHGYVEHSVRYQCKNYYK LRTEGDG corresponding to amino acids 1-64 of HPT_HUMAN (SEQ ID NO:131), which also corresponds to amino acids 1-64 of HUMHPA1B_PEA_{—}1_P62 (SEQ ID NO:134), and a second amino acid sequence being at least 70%, optionally at least 80%, preferably at least 85%, more preferably at least 90% and most preferably at least 95% homologous to a polypeptide having the sequence KMWTTVSMPYIQPPSLTFP (SEQ ID NO:495) corresponding to amino acids 65-83 of HUMHPA1B_PEA_{—}1_P62 (SEQ ID NO:134), wherein said first amino acid sequence and second amino acid sequence are contiguous and in a sequential order.

[0489] 2. An isolated polypeptide encoding for a tail of HUMHPA1B_PEA_{—}1_P62 (SEQ ID NO:134), comprising a polypeptide being at least 70%, optionally at least about 80%, preferably at least about 85%, more preferably at least about 90% and most preferably at least about 95% homologous to the sequence KMWTTVSMPYIQPPSLTFP (SEQ ID NO:495) in HUMHPA1B_PEA_{—}1_P62(SEQ ID NO:134).

[0490] The location of the variant protein was determined according to results from a number of different software programs and analyses, including analyses from SignalP and other specialized programs. The variant protein is believed to be located as follows with regard to the cell: secreted. The protein localization is believed to be secreted because of manual inspection of known protein localization and/or gene structure.

[0491] Variant protein HUMHPA1B_PEA_{—}1_P62 (SEQ ID NO:134) also has the following non-silent SNPs (Single Nucleotide Polymorphisms) as listed in Table 10, (given according to their position(s) on the amino acid sequence, with the alternative amino acid(s) listed; the last column indicates whether the SNP is known or not; the presence of known SNPs in variant protein HUMHPA1B_PEA_{—}1_P62 (SEQ ID NO:134) Sequence provides support for the deduced sequence of this variant protein according to the present invention).

TABLE 10
Amino acid mutations

| SNP position(s) on amino | Alternative | |
|---|---|---|
| acid sequence | amino acid(s) | Previously known SNP? |
| 8 | I -> | No |
| 38 | E -> D | No |

[0492] The glycosylation sites of variant protein HUMHPA1B_PEA_{—}1_P62 (SEQ ID NO:134), as compared to the known protein Haptoglobin precursor (SEQ ID NO:131), are described in Table 11 (given according to their position(s) on the amino acid sequence in the first column; the second column indicates whether the glycosylation site is present in the variant protein; and the last column indicates whether the position is different on the variant protein).

TABLE 11
Glycosylation site(s)

| Position(s) on known amino | |
|---|---|
| acid sequence | Present in variant protein? |
| 207 | no |
| 241 | no |
| 184 | no |
| 211 | no |

[0493] Variant protein HUMHPA1B_PEA_{—}1_P62 (SEQ ID NO:134) is encoded by the following transcript(s): HUMHPA1B_PEA_{—}1_T4 (SEQ ID NO:35), for which the sequence(s) is/are given at the end of the application. The coding portion of transcript HUMHPA1B_PEA_{—}1_T4 (SEQ ID NO:35) is shown in hold; this coding portion starts at position 68 and ends at position 316. The transcript also has the following SNPs as listed in Table 12 (given according to their position on the nucleotide sequence, with the alternative nucleic acid listed; the last column indicates whether the SNP is known or not; the presence of known SNPs in variant protein HUMHPA1B_PEA_{—}1_P62 (SEQ ID NO:134) Sequence provides support for the deduced sequence of this variant protein according to the present invention).

TABLE 12
Nucleic acid SNPs

| SNP position on nucleotide | | Previously |
|---|---|---|
| sequence | Alternative nucleic acid | known SNP? |
| 40 | T -> G | No |
| 77 | C -> T | No |
| 90 | T -> | No |
| 181 | G -> T | No |
| 512 | G -> C | No |
| 781 | T -> C | Yes |
| 798 | G -> C | Yes |
| 879 | A -> G | Yes |
| 1063 | T -> | No |
| 1124 | A -> G | Yes |
| 1173 | A -> G | No |
| 1199 | G -> A | Yes |
| 1215 | G -> A | No |
| 1216 | A -> G | No |
| 1241 | -> G | No |
| 1274 | -> G | No |
| 1326 | C -> G | No |
| 1391 | T -> C | Yes |
| 1391 | T -> G | Yes |
| 1411 | A -> | No |
| 1484 | T -> C | No |
| 1487 | -> G | No |
| 1488 | T -> G | No |
| 1526 | T -> C | No |
| 1532 | G -> | No |
| 1554 | T -> C | Yes |
| 1559 | G -> A | No |
| 1584 | A -> | No |
| 1631 | T -> A | No |
| 1729 | T -> C | No |
| 1763 | T -> C | No |
| 1783 | C -> T | No |
| 1823 | -> C | No |
| 1850 | T -> C | No |
| 1866 | -> C | No |
| 1892 | G -> | No |
| 1892 | G -> C | No |
| 1915 | -> C | No |
| 1930 | -> C | No |
| 2011 | -> C | No |
| 2078 | A -> C | No |
| 2079 | A -> G | No |
| 2172 | -> G | No |
| 2172 | -> T | No |

[0494] Variant protein HUMHPA1B_PEA_{—}1_P64 (SEQ ID NO:135) according to the present invention has an amino acid sequence as given at the end of the application; it is encoded by transcript(s) HUMHPA1B_PEA_{—}1_T6 (SEQ ID NO:36). An alignment is given to the known protein (Haptoglobin precursor (SEQ ID NO:131)) at the end of the application. One or more alignments to one or more previously published protein sequences are given at the end of the application. A brief description of the relationship of the variant protein according to the present invention to each such aligned protein is as follows:

[0495] Comparison report between HUMHPA1B_PEA_{—}1_P64 (SEQ ID NO:135) and HPT_HUMAN (SEQ ID NO:131):

[0496] 1. An isolated chimeric polypeptide encoding for HUMHPA1B_PEA_{—}1_P64 (SEQ ID NO:135), comprising a first amino acid sequence being at least 90% homologous to MSALGAVIALLLWGQLFAVDSGNDVTDIADDGCPKPPEIAHGYVEHSVRYQCKNYYK LRTEGDGVYTLNDKKQWfNKAVGDKLPECEADDGCPKPPEIAHGYVEHSVRYQCKNY YKLRTEGDG corresponding to amino acids 1-123 of HPT_HUMAN (SEQ ID NO:131), which also corresponds to amino acids 1-123 of HUMHPA1B_PEA_{—}1_P64 (SEQ ID NO:135), and a second amino acid sequence being at least 70%, optionally at least 80%, preferably at least 85%, more preferably at least 90% and most preferably at least 95% homologous to a polypeptide having the sequence KMWTTVSMPYIQPPSLTFP (SEQ ID NO:495) corresponding to amino acids 124-142 of HUMHPA1B_PEA_{—}1_P64 (SEQ ID NO:135), wherein said first amino acid sequence and second amino acid sequence are contiguous and in a sequential order.

[0497] 2. An isolated polypeptide encoding for a tail of HUMHPA1B_PEA_{—}1_P64 (SEQ ID NO:135), comprising a polypeptide being at least 70%, optionally at least about 80%, preferably at least about 85%, more preferably at least about 90% and most preferably at least about 95% homologous to the sequence KMWTTVSMPYIQPPSLTFP (SEQ ID NO:495) in HUMHPA1B_PEA_{—}1_P64 (SEQ ID NO:135).

[0498] The location of the variant protein was determined according to results from a number of different software programs and analyses, including analyses from SignalP and other specialized programs. The variant protein is believed to be located as follows with regard to the cell: secreted. The protein localization is believed to be secreted because of manual inspection of known protein localization and/or gene structure.

[0499] Variant protein HUMHPA1B_PEA_{—}1_P64 (SEQ ID NO:135) also has the following non-silent SNPs (Single Nucleotide Polymorphisms) as listed in Table 13, (given according to their position(s) on the amino acid sequence, with the alternative amino acid(s) listed; the last column indicates whether the SNP is known or not; the presence of known SNPs in variant protein HUMHPA1B_PEA_{—}1_P64 (SEQ ID NO:135) Sequence provides support for the deduced sequence of this variant protein according to the present invention).

TABLE 13
Amino acid mutations

| SNP position(s) on amino acid | | Previously |
|---|---|---|
| sequence | Alternative amino acid(s) | known SNP? |
| 8 | I -> | No |
| 38 | E -> D | No |
| 79 | V -> | No |
| 116 | K -> E | No |

[0500] The glycosylation sites of variant protein HUMHPA1B_PEA_{—}1_P64 (SEQ ID NO:135), as compared to the known protein Haptoglobin precursor (SEQ ID NO:131), are described in Table 14 (given according to their position(s) on the amino acid sequence in the first column; the second column indicates whether the glycosylation site is present in the variant protein; and the last column indicates whether the position is different on the variant protein).

TABLE 14
Glycosylation site(s)

| Position(s) on known amino | |
|---|---|
| acid sequence | Present in variant protein? |
| 207 | no |
| 241 | no |
| 184 | no |
| 211 | no |

[0501] Variant protein HUMHPA1B_PEA_{—}1_P64 (SEQ ID NO:135) is encoded by the following transcript(s): HUMHPA1B_PEA_{—}1_T6 (SEQ ID NO:36), for which the sequence(s) is/are given at the end of the application. The coding portion of transcript HUMHPA1B_PEA_{—}1_T6 (SEQ ID NO:36) is shown in bold; this coding portion starts at position 68 and ends at position 493. The transcript also has the following SNPs as listed in Table 15 (given according to their position on the nucleotide sequence, with the alternative nucleic acid listed; the last column indicates whether the SNP is known or not; the presence of known SNPs in variant protein HUMHPA1B_PEA_L_P64 (SEQ ID NO:135) Sequence provides support for the deduced sequence of this variant protein according to the present invention).

TABLE 15
Nucleic acid SNPs

| SNP position on nucleotide | | Previously |
|---|---|---|
| sequence | Alternative nucleic acid | known SNP? |
| 40 | T -> G | No |
| 77 | C -> T | No |
| 90 | T -> | No |
| 181 | G -> T | No |
| 303 | T -> | No |
| 364 | A -> G | Yes |
| 413 | A -> G | No |
| 570 | C -> G | No |
| 689 | G -> C | No |
| 1060 | A -> T | Yes |
| 1103 | C -> T | Yes |
| 1109 | G -> A | Yes |
| 1118 | T -> C | Yes |
| 1180 | C -> T | Yes |
| 1197 | G -> A | Yes |
| 1213 | G -> A | No |
| 1214 | A -> G | No |
| 1239 | -> G | No |
| 1272 | -> G | No |
| 1324 | C -> G | No |
| 1389 | T -> C | Yes |
| 1389 | T -> G | Yes |
| 1409 | A -> | No |
| 1482 | T -> C | No |
| 1485 | -> G | No |
| 1486 | T -> G | No |
| 1524 | T -> C | No |
| 1530 | G -> | No |
| 1552 | T -> C | Yes |
| 1557 | G -> A | No |
| 1582 | A -> | No |
| 1629 | T -> A | No |
| 1727 | T -> C | No |
| 1761 | T -> C | No |
| 1781 | C -> T | No |
| 1821 | -> C | No |
| 1848 | T -> C | No |
| 1864 | -> C | No |
| 1890 | G -> | No |
| 1890 | G -> C | No |
| 1913 | -> C | No |
| 1928 | -> C | No |
| 2009 | -> C | No |
| 2076 | A -> C | No |
| 2077 | A -> G | No |
| 2170 | -> G | No |
| 2170 | -> T | No |

[0502] Variant protein HUMHPA1B_PEA_{—}1_P65 (SEQ ID NO:136) according to the present ion has an amino acid sequence as given at the end of the application; it is encoded by transcript(s) HUMHPA1B_PEA_{—}1_T7 (SEQ ID NO:37). An alignment is given to the known protein (Haptoglobin precursor (SEQ ID NO:131)) at the end of the application. One or more alignments to one or more previously published protein sequences are given at the end of the application. A brief description of the relationship of the variant protein according to the present invention to each such aligned protein is as follows:

[0503] Comparison report between HUMHPA1B_PEA_{—}1_P65 (SEQ ID NO:136) and HPT_HUMAN (SEQ ID NO:131):

[0504] 1. An isolated chimeric polypeptide encoding for HUMHPA1B_PEA_{—}1_P65 (SEQ ID NO:136), comprising a first amino acid sequence being at least 90% homologous to MSALGAVIALLLWGQLFAVDSGNDVTDIADDGCPKPPEIAHGYVEHSVRYQCKNYYK LRTEGDGVYTLNDKKQWINKAVGDKLPECEADDGCPKPPEIAHGYVEHSVRYQCKNY YKLRTEGDGVYTLNNEKQWINKAVGDKLPECEA corresponding to amino acids 1-147 of HPT_HUMAN (SEQ ID NO:131), which also corresponds to amino acids 1-147 of HUMHPA1B_PEA_{—}1_P65 (SEQ ID NO:136), and a second amino acid sequence being at least 70%, optionally at least 80%, preferably at least 85%, more preferably at least 90% and most preferably at least 95% homologous to a polypeptide having the sequence GGC corresponding to amino acids 148-150 of HUMHPA1B_PEA_{—}1_P65 (SEQ ID NO:136), wherein said first amino acid sequence and second amino acid sequence are contiguous and in a sequential order.

[0505] The location of the variant protein was determined according to results from a number of different software programs and analyses, including analyses from SignalP and other specialized programs. The variant protein is believed to be located as follows with regard to the cell: secreted. The protein localization is believed to be secreted because of manual inspection of known protein localization and/or gene structure.

[0506] Variant protein HUMHPA1B_PEA_{—}1_P65 (SEQ ID NO:136) also has the following non-silent SNPs (Single Nucleotide Polymorphisms) as listed in Table 16, (given according to their position(s) on the amino acid sequence, with the alternative amino acid(s) listed; the last column indicates whether the SNP is known or not; the presence of known SNPs in variant protein HUMHPA1B_PEA_{—}1_P65 (SEQ ID NO:136) Sequence provides support for the deduced sequence of this variant protein according to the present invention).

TABLE 16
Amino acid mutations

| SNP position(s) on amino acid | | Previously |
|---|---|---|
| sequence | Alternative amino acid(s) | known SNP? |
| 8 | I -> | No |
| 38 | E -> D | No |
| 79 | V -> | No |
| 116 | K -> E | No |
| 130 | E -> G | No |
| 130 | E -> K | No |

[0507] The glycosylation sites of variant protein HUMHPA1B_PEA_{—}1_P65 (SEQ ID NO:136), as compared to the known protein Haptoglobin precursor (SEQ ID NO:131), are described in Table 17 (given according to their position(s) on the amino acid sequence in the first column; the second column indicates whether the glycosylation site is present in the variant protein; and the last column indicates whether the position is different on the variant protein).

TABLE 17
Glycosylation site(s)

| Position(s) on known amino | |
|---|---|
| acid sequence | Present in variant protein? |
| 207 | no |
| 241 | no |
| 184 | no |
| 211 | no |

[0508] Variant protein HUMHPA1B_PEA_{—}1_P65 (SEQ ID NO:136) is encoded by the following transcript(s): HUMHPA1B_PEA_{—}1_T7 (SEQ ID NO:37), for which the sequence(s) is/are given at the end of the application. The coding portion of transcript HUMHPA1B_PEA_{—}1_T7 (SEQ ID NO:37) is shown in bold; this coding portion starts at position 68 and ends at position 517. The transcript also has the following SNPs as listed in Table 18 (given according to their position on the nucleotide sequence, with the alternative nucleic acid listed; the last column indicates whether the SNP is known or not; the presence of known SNPs in variant protein HUMHPA1B_PEA_{—}1_P65 (SEQ ID NO:136) Sequence provides support for the deduced sequence of this variant protein according to the present invention).

TABLE 18
Nucleic acid SNPs

| SNP position on | | |
|---|---|---|
| nucleotide sequence | Alternative nucleic acid | Previously known SNP? |
| 40 | T -> G | No |
| 77 | C -> T | No |
| 90 | T -> | No |
| 181 | G -> T | No |
| 303 | T -> | No |
| 364 | A -> G | Yes |
| 413 | A -> G | No |
| 439 | G -> A | Yes |
| 455 | G -> A | No |
| 456 | A -> G | No |
| 481 | -> G | No |
| 556 | C -> A | Yes |
| 730 | T -> C | Yes |
| 751 | T -> C | Yes |
| 945 | A -> C | Yes |
| 956 | G -> A | Yes |
| 1312 | G -> A | Yes |
| 1332 | T -> C | Yes |
| 1437 | -> G | No |
| 1489 | C -> G | No |
| 1554 | T -> C | Yes |
| 1554 | T -> G | Yes |
| 1574 | A -> | No |
| 1647 | T -> C | No |
| 1650 | -> G | No |
| 1651 | T -> G | No |
| 1689 | T -> C | No |
| 1695 | G -> | No |
| 1717 | T -> C | Yes |
| 1722 | G -> A | No |
| 1747 | A -> | No |
| 1794 | T -> A | No |
| 1892 | T -> C | No |
| 1926 | T -> C | No |
| 1946 | C -> T | No |
| 1986 | -> C | No |
| 2013 | T -> C | No |
| 2029 | -> C | No |
| 2055 | G -> | No |
| 2055 | G -> C | No |
| 2078 | -> C | No |
| 2093 | -> C | No |
| 2174 | -> C | No |
| 2241 | A -> C | No |
| 2242 | A -> G | No |
| 2335 | -> G | No |
| 2335 | -> T | No |

[0509] Variant protein HUMHPA1B_PEA_{—}1_P68 (SEQ ID NO:137) according to the present invention has an amino acid sequence as given at the end of the application; it is encoded by transcript(s) HUMHPA1B_PEA_{—}1_T12 (SEQ ID NO:38). An alignment is given to the known (Haptoglobin precursor (SEQ ID NO:131)) at the end of the application. One or more ents to one or more previously published protein sequences are given at the end of the application. A brief description of the relationship of the variant protein according to the present invention to each such aligned protein is as follows:

[0510] Comparison report between HUMHPA1B_PEA_{—}1_P68 (SEQ ID NO:137) and HPT_HUMAN (SEQ ID NO:131):

[0511] 1. An isolated chimeric polypeptide encoding for HUMHPA1B_PEA_{—}1_P68 (SEQ ID NO:137), comprising a first amino acid sequence being at least 90% homologous to MSALGAVIALLLWGQLFAVDSGNDVTDIADDGCPKPPEIAHGYVEHSVRYQCKNYYK LRTEGDGVYTLNDK corresponding to amino acids 1-71 of HPT_HUMAN (SEQ ID NO:131), which also corresponds to amino acids 1-71 of HUMHPA1B_PEA_{—}1_P68 (SEQ ID NO:137), and a second amino acid sequence being at least 90% homologous to KQWINKAVGDKLPECEAVCGKPKNPANPVQRILGGHLDAKGSFPWQAKMVSHHNLTT GATLINEQWLLTTAKNLFLNHSENATAKDIAPTLTLYVGKKQLVEIEKVVLHPNYSQVD IGLIKLKQKVSVNERVMPICLPSKDYAEVGRVGYVSGWGRNANFKFTDHLKYVMLPV ADQDQCIRHYEGSTVPEKKTPKSPVGVQPILNEHTFCAGMSKYQEDTCYGDAGSAFAV HDLEEDTWYATGILSFDKSCAVAEYGVYVKVTSIQDWVQKTIAEN corresponding to amino acids 131-406 of HPT_HUMAN (SEQ ID NO:131), which also corresponds to amino acids 72-347 of HUMHPA1B_PEA_{—}1_P68 (SEQ ID NO:137), wherein said first amino acid sequence and second amino acid sequence are contiguous and in a sequential order.

[0512] 2. An isolated chimeric polypeptide encoding for an edge portion of HUMHPA1B_PEA_{—}1_P68 (SEQ ID NO:137), comprising a polypeptide having a length “n”, wherein n is at least about 10 amino acids in length, optionally at least about 20 amino acids in length, preferably at least about 30 amino acids in length, more preferably at least about 40 amino acids in length and most preferably at least about 50 amino acids in length, wherein at least two amino acids comprise KK, having a structure as follows: a sequence starting from any of amino acid numbers 71−x to 71; and ending at any of amino acid numbers 72+((n−2)−x), in which x varies from 0 to n-2.

[0513] The location of the variant protein was determined according to results from a number of different software programs and analyses, including analyses from SignalP and other specialized programs. The variant protein is believed to be located as follows with regard to the cell: secreted. The protein localization is believed to be secreted because of manual inspection of known protein localization and/or gene structure.

[0514] Variant protein HUMHPA1B_PEA_{—}1_P68 (SEQ ID NO:137) also has the following non-silent SNPs (Single Nucleotide Polymorphisms) as listed in Table 19, (given according to their position(s) on the amino acid sequence, with the alternative amino acid(s) listed; the last column indicates whether the SNP is known or not; the presence of known SNPs in variant protein HUMHPA1B_PEA_{—}1_P68 (SEQ ID NO:137) Sequence provides support for the deduced sequence of this variant protein according to the present invention).

TABLE 19
Amino acid mutations

| SNP position(s) on | | |
|---|---|---|
| amino acid sequence | Alternative amino acid(s) | Previously known SNP? |
| 8 | I -> | No |
| 38 | E -> D | No |
| 79 | V -> | No |
| 108 | L -> V | No |
| 136 | Q -> | No |
| 162 | L -> V | No |
| 176 | K -> | No |
| 184 | S -> P | Yes |
| 194 | K -> | No |
| 242 | L -> P | No |
| 260 | P -> L | No |
| 296 | A -> | No |

[0515] The glycosylation sites of variant protein HUMHPA1B_PEA_{—}1_P68 (SEQ ID NO:137), as compared to the known protein Haptoglobin precursor (SEQ ID NO:131), are described in Table 20 (given according to their position(s) on the amino acid sequence in the first column; the second column indicates whether the glycosylation site is present in the variant protein; and the last column indicates whether the position is different on the variant protein).

TABLE 20
Glycosylation site(s)

| Position(s) on | | |
|---|---|---|
| known amino | | |
| acid sequence | Present in variant protein? | Position in variant protein? |
| 207 | yes | 148 |
| 241 | yes | 182 |
| 184 | yes | 125 |
| 211 | yes | 152 |

[0516] Variant protein HUMHPA1B_PEA_{—}1_P68 (SEQ ID NO:137) is encoded by the following transcript(s): HUMHPA1B_PEA_{—}1_T12 (SEQ ID NO:38, for which the sequence(s) is/are given at the end of the application. The coding portion of transcript HUMHPA1B_PEA_{—}1_T12 SEQ ID NO:38) is shown in bold; this coding portion starts at position 68 and ends at position 1108. The transcript also has the following SNPs as listed in Table 21 (given according to their position on the nucleotide sequence, with the alternative nucleic acid listed; the last column indicates whether the SNP is known or not; the presence of known SNPs in variant protein HUMHPA1B_PEA_{—}1_P68 (SEQ ID NO:137) Sequence provides support for the deduced sequence of this variant protein according to the present invention).

TABLE 21
Nucleic acid SNPs

| SNP position on | | |
|---|---|---|
| nucleotide sequence | Alternative nucleic acid | Previously known SNP? |
| 40 | T -> G | No |
| 77 | C -> T | No |
| 90 | T -> | No |
| 181 | G -> T | No |
| 303 | T -> | No |
| 337 | -> G | No |
| 389 | C -> G | No |
| 454 | T -> C | Yes |
| 454 | T -> G | Yes |
| 474 | A -> | No |
| 547 | T -> C | No |
| 550 | -> G | No |
| 551 | T -> G | No |
| 589 | T -> C | No |
| 595 | G -> | No |
| 617 | T -> C | Yes |
| 622 | G -> A | No |
| 647 | A -> | No |
| 694 | T -> A | No |
| 792 | T -> C | No |
| 826 | T -> C | No |
| 846 | C -> T | No |
| 886 | -> C | No |
| 913 | T -> C | No |
| 929 | -> C | No |
| 955 | G -> | No |
| 955 | G -> C | No |
| 978 | -> C | No |
| 993 | -> C | No |
| 1074 | -> C | No |
| 1141 | A -> C | No |
| 1142 | A -> G | No |
| 1235 | -> G | No |
| 1235 | -> T | No |

[0517] Variant protein HUMHPA1B_PEA_{—}1_P72 (SEQ ID NO:138) according to the present invention has an amino acid sequence as given at the end of the application; it is encoded by transcript(s) HUMHPA1B_PEA_{—}1_T16 (SEQ ID NO:39). An alignment is given to the known protein (Haptoglobin precursor (SEQ ID NO:131)) at the end of the application. One or more alignments to one or more previously published protein sequences are given at the end of the application. A brief description of the relationship of the variant protein according to the present invention to each such aligned protein is as follows:

[0518] Comparison report between HUMHPA1B_PEA_{—}1_P72 (SEQ ID NO:138) and HPT_HUMAN (SEQ ID NO:131):

[0519] 1. An isolated chimeric polypeptide encoding for HUMHPA1B_PEA_{—}1_P72 (SEQ ID NO:138), comprising a first amino acid sequence being at least 90% homologous to MSALGAVIALLLWGQLFAVDSGNDVTDIADDGCPKPPEIAHGYVEHSVRYQCKNYYK LRTEGD corresponding to amino acids 1-63 of HPT_HUMAN (SEQ ID NO:131), which also corresponds to amino acids 1-63 of HUMHPA1B_PEA_{—}1_P72 (SEQ ID NO:138), and a second amino acid sequence being at least 70%, optionally at least 80%, preferably at least 85%, more preferably at least 90% and most preferably at least 95% homologous to a polypeptide having the sequence ESGKPSAADPGWTPGCQRQLSLAG (SEQ ID NO:497) corresponding to amino acids 64-87 of HUMHPA1B_PEA_{—}1_P72 (SEQ ID NO:138), wherein said first amino acid sequence and second amino acid sequence are contiguous and in a sequential order.

[0520] 2. An isolated polypeptide encoding for a tail of HUMHPA1B_PEA_{—}1_P72 (SEQ ID NO:138), comprising a polypeptide being at least 70%, optionally at least about 80%, preferably at least about 85%, more preferably at least about 90% and most preferably at least about 95% homologous to the sequence ESGKPSAADPGWTPGCQRQLSLAG (SEQ ID NO:497) in HUMHPA1B_PEA_{—}1_P72 (SEQ ID NO:138).

[0521] The location of the variant protein was determined according to results from a number of different software programs and analyses, including analyses from SignalP and other specialized programs. The variant protein is believed to be located as follows with regard to the cell: secreted. The protein localization is believed to be secreted because of manual inspection of known protein localization and/or gene structure.

[0522] Variant protein HUMHPA1B_PEA_{—}1_P72 (SEQ ID NO:138) also has the following non-silent SNPs (Single Nucleotide Polymorphisms) as listed in Table 22, (given according to their position(s) on the amino acid sequence, with the alternative amino acid(s) listed; the last column indicates whether the SNP is known or not; the presence of known SNPs in variant protein HUMHPA1B_PEA_{—}1_P72 (SEQ ID NO:138) Sequence provides support for the deduced sequence of this variant protein according to the present invention).

TABLE 22
Amino acid mutations

| SNP position(s) on | | |
|---|---|---|
| amino acid sequence | Alternative amino acid(s) | Previously known SNP? |
| 8 | I -> | No |
| 38 | E -> D | No |
| 77 | P -> R | No |

[0523] The glycosylation sites of variant protein HUMHPA1B_PEA_{—}1_P72 (SEQ ID NO:138), as compared to the known protein Haptoglobin precursor (SEQ ID NO:131), are described in Table 23 (given according to their position(s) on the amino acid sequence in the first column; the second column indicates whether the glycosylation site is present in the variant protein; and the last column indicates whether the position is different on the variant protein).

TABLE 23
Glycosylation site(s)

| Position(s) on known amino | |
|---|---|
| acid sequence | Present in variant protein? |
| 207 | no |
| 241 | no |
| 184 | no |
| 211 | no |

[0524] Variant protein HUMHPA1B_PEA_{—}1_P72 (SEQ ID NO:138) is encoded by the following transcript(s): HUMHPA1B_PEA_{—}1_T16 (SEQ ID NO:39), for which the sequence(s) is/are given at the end of the application. The coding portion of transcript HUMHPA1B_PEA_{—}1_T16 (SEQ ID NO:39) is shown in bold; this coding portion starts at position 68 and ends at position 328. The transcript also has the following SNPs as listed in Table 24 (given according to their position on the nucleotide sequence, with the alternative nucleic acid listed; the last column indicates whether the SNP is known or not; the presence of known SNPs in variant protein HUMHPA1B_PEA_{—}1_P72 (SEQ ID NO:138) Sequence provides support for the deduced sequence of this variant protein according to the present invention).

TABLE 24
Nucleic acid SNPs

| SNP position on | | |
|---|---|---|
| nucleotide sequence | Alternative nucleic acid | Previously known SNP? |
| 40 | T -> G | No |
| 77 | C -> T | No |
| 90 | T -> | No |
| 181 | G -> T | No |
| 297 | C -> G | No |
| 362 | T -> C | Yes |
| 362 | T -> G | Yes |
| 382 | A -> | No |
| 455 | T -> C | No |
| 458 | -> G | No |
| 459 | T -> G | No |
| 497 | T -> C | No |
| 503 | G -> | No |
| 525 | T -> C | Yes |
| 530 | G -> A | No |
| 555 | A -> | No |
| 602 | T -> A | No |
| 700 | T -> C | No |
| 734 | T -> C | No |
| 754 | C -> T | No |
| 794 | -> C | No |
| 821 | T -> C | No |
| 837 | -> C | No |
| 863 | G -> | No |
| 863 | G -> C | No |
| 886 | -> C | No |
| 901 | -> C | No |
| 982 | -> C | No |
| 1049 | A -> C | No |
| 1050 | A -> G | No |
| 1143 | -> G | No |
| 1143 | -> T | No |

[0525] Variant protein HUMHPA1B_PEA_{—}1_P75 (SEQ ID NO:139) according to the present invention has an amino acid sequence as given at the end of the application; it is encoded by transcript(s) HUMHPA1B_PEA_{—}1_T19 (SEQ ID NO:40). An alignment is given to the known protein (Haptoglobin precursor (SEQ ID NO:131)) at the end of the application. One or more alignments to one or more previously published protein sequences are given at the end of the application. A brief description of the relationship of the variant protein according to the present invention to each such aligned protein is as follows:

[0526] Comparison report between HUMHPA1B_PEA_{—}1_P75 (SEQ ID NO:139) and HPT_HUMAN (SEQ ID NO:131):

[0527] 1. An isolated chimeric polypeptide encoding for HUMHPA1B_PEA_{—}1_P75 (SEQ ID NO:139), comprising a first amino acid sequence being at least 90% homologous to MSALGAVIALLLWGQLFAVDSGNDVTDIADDGCPKPPEIAHGYVEHSVRYQCKNYYK LRTEGDGVYTLNDKKQWINKAVGDKLPECEADDGCPKPPEIAHGYVEHSVRYQCKNY YKLRTEGDGVYTLNNEKQWINKAVGDKLPECEA corresponding to amino acids 1-147 of HPT_HUMAN (SEQ ID NO:131), which also corresponds to amino acids 1-147 of HUMHPA1B_PEA_{—}1_P75 (SEQ ID NO:139), and a second amino acid sequence being at least 90% homologous to GATLINEQWLLTTAKNLFLNHSENATAKDIAPTLTLYVGKKQLVEIEKVVLHPNYSQVD IGLIKLKQKVSVNERVMPICLPSKDYAEVGRVGYVSGWGRNANFKFTDHLKYVMLPV ADQDQCIRHYEGSTVPEKKTPKSPVGVQPILNEHTFCAGMSKYQEDTCYGDAGSAFAV HDLEEDTWYATGILSFDKSCAVAEYGVYVKVTSIQDWVQKTIAEN corresponding to amino acids 188-406 of HPT_HUMAN (SEQ ID NO:131), which also corresponds to amino acids 148-366 of HUMHPA1B_PEA_{—}1_P75 (SEQ ID NO:139), wherein said first amino acid sequence and second amino acid sequence are contiguous and in a sequential order.

[0528] 2. An isolated chimeric polypeptide encoding for an edge portion of HUMHPA1B_PEA_{—}1_P75 (SEQ ID NO:139), comprising a polypeptide having a length “n”, wherein n is at least about 10 amino acids in length, optionally at least about 20 amino acids in length, preferably at least about 30 amino acids in length, more preferably at least about 40 amino acids in length and most preferably at least about 50 amino acids in length, wherein at least two amino acids comprise AG, having a structure as follows: a sequence starting from any of amino acid numbers 147−x to 147; and ending at any of amino acid numbers 148+((n−2)−x), in which x varies from 0 to n−2.

[0529] The location of the variant protein was determined according to results from a number of different software programs and analyses, including analyses from SignalP and other specialized programs. The variant protein is believed to be located as follows with regard to the cell: secreted. The protein localization is believed to be secreted because both signal-peptide prediction programs predict that this protein has a signal peptide, and neither trans-membrane region prediction program predicts that this protein has a trans-membrane region.

[0530] Variant protein HUMHPA1_B_PEA_{—}1_P75 (SEQ ID NO:139) also has the following non-silent SNPs (Single Nucleotide Polymorphisms) as listed in Table 25, (given according to their position(s) on the amino acid sequence, with the alternative amino acid(s) listed; the last column indicates whether the SNP is known or not; the presence of known SNPs in variant protein HUMHPA1B_PEA_{—}1_P75 (SEQ ID NO:139) Sequence provides support for the deduced sequence of this variant protein according to the present invention).

TABLE 25
Amino acid mutations

| SNP position(s) on | | |
|---|---|---|
| amino acid sequence | Alternative amino acid(s) | Previously known SNP? |
| 8 | I -> | No |
| 38 | E -> D | No |
| 79 | V -> | No |
| 116 | K -> E | No |
| 130 | E -> G | No |
| 130 | E -> K | No |
| 155 | Q -> | No |
| 181 | L -> V | No |
| 195 | K -> | No |
| 203 | S -> P | Yes |
| 213 | K -> | No |
| 261 | L -> P | No |
| 279 | P -> L | No |
| 315 | A -> | No |

[0531] The glycosylation sites of variant protein HUMHPA1B_PEA_{—}1_P75 (SEQ ID NO:139), compared to the known protein Haptoglobin precursor (SEQ ID NO:131), are described in Table 26 (given according to their position(s) on the amino acid sequence in the first column; the second column indicates whether the glycosylation site is present in the variant protein; and the last column indicates whether the position is different on the variant protein).

TABLE 26
Glycosylation site(s)

| Position(s) on | | |
|---|---|---|
| known amino | | |
| acid sequence | Present in variant protein? | Position in variant protein? |
| 207 | yes | 167 |
| 241 | yes | 201 |
| 184 | no | |
| 211 | yes | 171 |

[0532] Variant protein HUMHPA1B_PEA_{—}1_P75 (SEQ ID NO:139) is encoded by the following transcript(s): HUMHPA1B_PEA_{—}1_T19 (SEQ ID NO:40), for which the sequence(s) is/are given at the end of the application. The coding portion of transcript HUMHPA1B_PEA_{—}1_T19 (SEQ ID NO:40) is shown in bold; this coding portion starts at position 68 and ends at position 1165. The transcript also has the following SNPs as listed in Table 27 (given according to their position on the nucleotide sequence, with the alternative nucleic acid listed; the last column indicates whether the SNP is known or not; the presence of known SNPs in variant protein HUMHPA1B_PEA_{—}1_P75 (SEQ ID NO:139) Sequence provides support for the deduced sequence of this variant protein according to the present invention).

TABLE 27
Nucleic acid SNPs

| SNP position | | |
|---|---|---|
| nucleotide sequence | Alternative nucleic acid | Previously known SNP? |
| 40 | T -> G | No |
| 77 | C -> T | No |
| 90 | T -> | No |
| 181 | G -> T | No |
| 303 | T -> | No |
| 364 | A -> G | Yes |
| 413 | A -> G | No |
| 439 | G -> A | Yes |
| 455 | G -> A | No |
| 456 | A -> G | No |
| 481 | -> G | No |
| 511 | T -> C | Yes |
| 511 | T -> G | Yes |
| 531 | A -> | No |
| 604 | T -> C | No |
| 607 | -> G | No |
| 608 | T -> G | No |
| 646 | T -> C | No |
| 652 | G -> | No |
| 674 | T -> C | Yes |
| 679 | G -> A | No |
| 704 | A -> | No |
| 751 | T -> A | No |
| 849 | T -> C | No |
| 883 | T -> C | No |
| 903 | C -> T | No |
| 943 | -> C | No |
| 970 | T -> C | No |
| 986 | -> C | No |
| 1012 | G -> | No |
| 1012 | G -> C | No |
| 1035 | -> C | No |
| 1050 | -> C | No |
| 1131 | -> C | No |
| 1198 | A -> C | No |
| 1199 | A -> G | No |
| 1292 | -> G | No |
| 1292 | -> T | No |

[0533] Variant protein HUMHPA1B_PEA_{—}1_P76 (SEQ ID NO:140) according to the present invention has an amino acid sequence as given at the end of the application; it is encoded by transcript(s) HUMHPA1B_PEA_{—}1_T20 (SEQ ID NO:41). An alignment is given to the known protein (Haptoglobin precursor (SEQ ID NO:131)) at the end of the application. One or more alignments to one or more previously published protein sequences are given at the end of the application. A brief description of the relationship of the variant protein according to the present invention to each such aligned protein is as follows:

[0534] Comparison report between HUMHPA1B_PEA_{—}1_P76 (SEQ ID NO:140) and HPT_HUMAN (SEQ ID NO:131):

[0535] 1. An isolated chimeric polypeptide encoding for HUMHPA1B_PEA_{—}1_P76 (SEQ ID NO:40), comprising a first amino acid sequence being at least 90% homologous to MSALGAVIALLLWGQLFAVDSGNDVTDIADDGCPKPPEIAHGYVEHSVRYQ corresponding to amino acids 1-51 of HPT_HUMAN (SEQ ID NO:131), which also corresponds to amino acids 1-51 of HUMHPA1B_PEA_{—}1_P76 (SEQ ID NO:140), a second amino acid sequence bridging amino acid sequence comprising of L, and a third amino acid sequence being at least 90% homologous to QRILGGHLDAKGSFPWQAKMVSHHNLTTGATLINEQWLLTTAKNLFLNHSENATAKDI APTLTLYVGKKQLVEIEKVVLHPNYSQVDIGLIKLKQKVSVNERVMPICLPSKDYAEVG RVGYVSGWGRNANFKFTDHLKYVMLPVADQDQCIRHYEGSTVPEKKTPKSPVGVQPIL NEHTFCAGMSKYQEDTCYGDAGSAFAVHDLEEDTWYATGILSFDKSCAVAEYGVYVK VTSIQDWVQKTIAEN corresponding to amino acids 160-406 of HPT_HUMAN (SEQ ID NO:131), which also corresponds to amino acids 53-299 of HUMHPA1B_PEA_{—}1_P76 (SEQ ID NO:140), wherein said first amino acid sequence, second amino acid sequence and third amino acid sequence are contiguous and in a sequential order.

[0536] 2. An isolated polypeptide encoding for an edge portion of HUMHPA1B_PEA_{—}1_P76 (SEQ ID NO:140), comprising a polypeptide having a length “n”, wherein n is at least about 10 amino acids in length, optionally at least about 20 amino acids in length, preferably at least about 30 amino acids in length, more preferably at least about 40 amino acids in length and most preferably at least about 50 amino acids in length, wherein at least two amino acids comprise QLQ having a structure as follows (numbering according to HUMHPA1B_PEA_{—}1_P76 (SEQ ID NO:140)): a sequence starting from any of amino acid numbers 51−x to 51; and ending at any of amino acid numbers 53+((n−2)−x), in which x varies from 0 to n−2.

[0537] The location of the variant protein was determined according to results from a number of different software programs and analyses, including analyses from SignalP and other specialized programs. The variant protein is believed to be located as follows with regard to the cell: secreted. The protein localization is believed to be secreted because of manual inspection of known protein localization and/or gene structure.

[0538] Variant protein HUMHPA1B_PEA_{—}1_P76 (SEQ ID NO:140) also has the following non-silent SNPs (Single Nucleotide Polymorphisms) as listed in Table 28, (given according to their position(s) on the amino acid sequence, with the alternative amino acid(s) listed; the last column indicates whether the SNP is known or not; the presence of known SNPs in variant protein HUMHPA1B_PEA_{—}1_P76 (SEQ ID NO:140) Sequence provides support for the deduced sequence of this variant protein according to the present invention).

TABLE 28
Amino acid mutations

| SNP position(s) | | |
|---|---|---|
| on amino acid | Alternative | Previously |
| sequence | amino acid(s) | known SNP? |
| 8 | I -> | No |
| 38 | E -> D | No |
| 60 | L -> V | No |
| 88 | Q -> | No |
| 114 | L -> V | No |
| 128 | K -> | No |
| 136 | S -> P | Yes |
| 146 | K -> | No |
| 194 | L -> P | No |
| 212 | P -> L | No |
| 248 | A -> | No |

[0539] The glycosylation sites of variant protein HUMHPA1B_PEA_{—}1_P76 (SEQ ID NO:140), as compared to the known protein Haptoglobin precursor (SEQ ID NO:131), are described in Table 29 (given according to their position(s) on the amino acid sequence in the first column; the second column indicates whether the glycosylation site is present in the variant protein; and the last column indicates whether the position is different on the variant protein).

TABLE 29
Glycosylation site(s)

| Position(s) on known amino | Present in | Position in |
|---|---|---|
| acid sequence | variant protein? | variant protein? |
| 207 | yes | 100 |
| 241 | yes | 134 |
| 184 | yes | 77 |
| 211 | yes | 104 |

[0540] Variant protein HUMHPA1B_PEA_{—}1_P76 (SEQ ID NO:140) is encoded by the following transcript(s): HUMHPA1B_PEA_{—}1_T20 (SEQ ID NO:41), for which the sequence(s) is/are given at the end of the application. The coding portion of transcript HUMHPA1B_PEA_{—}1_T20 (SEQ ID NO:41) is shown in bold; this coding portion starts at position 68 and ends at position 964. The transcript also has the following SNPs as listed in Table 30 (given according to their position on the nucleotide sequence, with the alternative nucleic acid listed; the last column indicates whether the SNP is known or not; the presence of known SNPs in variant protein HUMHPA1B_PEA_{—}1_P76 (SEQ ID NO:140) Sequence provides support for the deduced sequence of this variant protein according to the present invention).

TABLE 30
Nucleic acid SNPs

| SNP position on nucleotide | Alternative | Previously |
|---|---|---|
| sequence | nucleic acid | known SNP? |
| 40 | T -> G | No |
| 77 | C -> T | No |
| 90 | T -> | No |
| 181 | G -> T | No |
| 245 | C -> G | No |
| 310 | T -> C | Yes |
| 310 | T -> G | Yes |
| 330 | A -> | No |
| 403 | T -> C | No |
| 406 | -> G | No |
| 407 | T -> G | No |
| 445 | T -> C | No |
| 451 | G -> | No |
| 473 | T -> C | Yes |
| 478 | G -> A | No |
| 503 | A -> | No |
| 550 | T -> A | No |
| 648 | T -> C | No |
| 682 | T -> C | No |
| 702 | C -> T | No |
| 742 | -> C | No |
| 769 | T -> C | No |
| 785 | -> C | No |
| 811 | G -> | No |
| 811 | G -> C | No |
| 834 | -> C | No |
| 849 | -> C | No |
| 930 | -> C | No |
| 997 | A -> C | No |
| 998 | A -> G | No |
| 1091 | -> G | No |
| 1091 | -> T | No |

[0541] Variant protein HUMHPA1B_PEA_{—}1_P81 (SEQ ID NO:141) according to the present invention has an amino acid sequence as given at the end of the application; it is encoded by transcript(s) HUMHPA1B_PEA_{—}1_T27 (SEQ ID NO 42). An alignment is given to the known protein (Haptoglobin precursor (SEQ ID NO:131)) at the end of the application. One or more alignments to one or more previously published protein sequences are given at the end of the application. A brief description of the relationship of the variant protein according to the present invention to each such aligned protein is as follows:

[0542] Comparison report between HUMHPA1B_PEA_{—}1_P81 (SEQ ID NO:141) and HPT_HUMAN (SEQ ID NO:131):

[0543] 1. An isolated chimeric polypeptide encoding for HUMHPA1B_PEA_{—}1_P81 (SEQ ID NO:141), comprising a first amino acid sequence being at least 90% homologous to MSALGAVIALLLWGQLFAVDSGNDVTDIADDGCPKPPEIAHGYVEHSVRYQCKNYYK LRTEGDGVYTLNDKKQWINKAVGDKLPECEA corresponding to amino acids 1-88 of HPT_HUMAN (SEQ ID NO:131), which also corresponds to amino acids 1-88 of HUMHPA1B_PEA_{—}1_P81 (SEQ ID NO:141), and a second amino acid sequence being at least 90% homologous to GATLINEQWLLTTAKNLFLNHSENATAKDIAPTLTLYVGKKQLVEIEKVVLHPNYSQVD IGLIKLKQKVSVNERVMPICLPSKDYAEVGRVGYVSGWGRNANFKFTDHLKYVMLPV ADQDQCIRHYEGSTVPEKKTPKSPVGVQPILNEHTFCAGMSKYQEDTCYGDAGSAFAV HDLEEDTWYATGILSFDKSCAVAEYGVYVKVTSIQDWVQKTIAEN corresponding to amino acids 188-406 of HPT_HUMAN (SEQ ID NO:131), which also corresponds to amino acids 89-307 of HUMHPA1B_PEA_{—}1_P81 (SEQ ID NO:141), wherein said first amino acid sequence and second amino acid sequence are contiguous and in a sequential order.

[0544] 2. An isolated chimeric polypeptide encoding for an edge portion of HUMHPA1B_PEA_{—}1_P81 (SEQ ID NO:141), comprising a polypeptide having a length “n”, wherein n is at least about 10 amino acids in length, optionally at least about 20 amino acids in length, preferably at least about 30 amino acids in length, more preferably at least about 40 amino acids in length and most preferably at least about 50 amino acids in length, wherein at least two amino acids comprise AG, having a structure as follows: a sequence starting from any of amino acid numbers 88−x to 88; and ending at any of amino acid numbers 89+((n−2)−x), in which x varies from 0 to n−2.

[0545] The location of the variant protein was determined according to results from a number of different software programs and analyses, including analyses from SignalP and other specialized programs. The variant protein is believed to be located as follows with regard to the cell: secreted. The protein localization is believed to be secreted because of manual inspection of known protein localization and/or gene structure.

[0546] Variant protein HUMHPA1B_PEA_{—}1_P81 (SEQ ID NO:141) also has the following non-silent SNPs (Single Nucleotide Polymorphisms) as listed in Table 31, (given according to their position(s) on the amino acid sequence, with the alternative amino acid(s) listed; the last column indicates whether the SNP is known or not; the presence of known SNPs in variant protein HUMHPA1B_PEA_{—}1_P81 (SEQ ID NO:141) Sequence provides support for the deduced sequence of this variant protein according to the present invention).

TABLE 31
Amino acid mutations

| SNP position(s) on amino acid | Alternative | Previously |
|---|---|---|
| sequence | amino acid(s) | known SNP? |
| 8 | I -> | No |
| 38 | E -> D | No |
| 79 | V -> | No |
| 96 | Q -> | No |
| 122 | L -> V | No |
| 136 | K -> | No |
| 144 | S -> P | Yes |
| 154 | K -> | No |
| 202 | L -> P | No |
| 220 | P -> L | No |
| 256 | A -> | No |

[0547] The glycosylation sites of variant protein HUMHPA1B_PEA_{—}1_P81 (SEQ ID NO:141), as compared to the known protein Haptoglobin precursor (SEQ ID NO:131), are described in Table 32 (given according to their position(s) on the amino acid sequence in the first column; the second column indicates whether the glycosylation site is present in the variant protein; and the last column indicates whether the position is different on the variant protein).

TABLE 32
Glycosylation site(s)

| Position(s) on known amino | Present in | Position in |
|---|---|---|
| acid sequence | variant protein? | variant protein? |
| 207 | yes | 108 |
| 241 | yes | 142 |
| 184 | no | |
| 211 | yes | 112 |

[0548] Variant protein HUMHPA1B_PEA_{—}1_P81 (SEQ ID NO:141) is encoded by the following transcript(s): HUMHPA1B_PEA_{—}1_T27 (SEQ ID NO:42), for which the sequence(s) is/are given at the end of the application. The coding portion of transcript HUMHPA1B_PEA_{—}1_T27 (SEQ ID NO:42) is shown in bold; this coding portion starts at position 68 and ends at position 988. The transcript also has the following SNPs as listed in Table 33 (given according to their position on the nucleotide sequence, with the alternative nucleic acid listed; the last column indicates whether the SNP is known or not; the presence of known SNPs in variant protein HUMHPA1B_PEA_{—}1_P81 (SEQ ID NO:141) Sequence provides support for the deduced sequence of this variant protein according to the present invention).

TABLE 33
Nucleic acid SNPs

| SNP position on nucleotide | Alternative | Previously |
|---|---|---|
| sequence | nucleic acid | known SNP? |
| 40 | T -> G | No |
| 77 | C -> T | No |
| 90 | T -> | No |
| 181 | G -> T | No |
| 303 | T -> | No |
| 334 | T -> C | Yes |
| 334 | T -> G | Yes |
| 354 | A -> | No |
| 427 | T -> C | No |
| 430 | -> G | No |
| 431 | T -> G | No |
| 469 | T -> C | No |
| 475 | G -> | No |
| 497 | T -> C | Yes |
| 502 | G -> A | No |
| 527 | A -> | No |
| 574 | T -> A | No |
| 672 | T -> C | No |
| 706 | T -> C | No |
| 726 | C -> T | No |
| 766 | -> C | No |
| 793 | T -> C | No |
| 809 | -> C | No |
| 835 | G -> | No |
| 835 | G -> C | No |
| 858 | -> C | No |
| 873 | -> C | No |
| 954 | -> C | No |
| 1021 | A -> C | No |
| 1022 | A -> G | No |
| 1115 | -> G | No |
| 1115 | -> T | No |

[0549] Variant protein HUMHPA1B_PEA_{—}1_P83 (SEQ ID NO:142) according to the present invention has an amino acid sequence as given at the end of the application; it is encoded by transcript(s) HUMHPA1B_PEA_{—}1_T29 (SEQ ID NO:43). An alignment is given to the known protein (Haptoglobin precursor (SEQ ID NO:131)) at the end of the application. One or more alignments to one or more previously published protein sequences are given at the end of the application. A brief description of the relationship of the variant protein according to the present invention to each such aligned protein is as follows:

[0550] Comparison report between HUMHPA1B_PEA_{—}1_P83 (SEQ ID NO:142) and HPT_HUMAN (SEQ ID NO:131):

[0551] 1. An isolated chimeric polypeptide encoding for HUMHPA1B_PEA_{—}1_P83 (SEQ ID NO:142), comprising a first amino acid sequence being at least 90% homologous to MSALGAVIALLLWGQLFAVDSGNDVTDIAD corresponding to amino acids 1-30 of HPT_HUMAN (SEQ ID NO:131), which also corresponds to amino acids 1-30 of HUMHPA1B_PEA_{—}1_P83 (SEQ ID NO:142), and a second amino acid sequence being at least 70%, optionally at least 80%, preferably at least 85%, more preferably at least 90% and most preferably at least 95% homologous to a polypeptide having the sequence GFPP (SEQ ID NO:498) corresponding to amino acids 31-34 of HUMHPA1B_PEA_{—}1_P83 (SEQ ID NO:142), wherein said first amino acid sequence and second amino acid sequence are contiguous and in a sequential order.

[0552] 2. An isolated polypeptide encoding for a tail of HUMHPA1B_PEA_{—}1_P83 (SEQ ID NO:142), comprising a polypeptide being at least 70%, optionally at least about 80%, preferably at least about 85%, more preferably at least about 90% and most preferably at least about 95% homologous to the sequence GFPP (SEQ ID NO:498) in HUMHPA1B_PEA_{—}1_P83 (SEQ ID NO:142).

[0553] The location of the variant protein was determined according to results from a number of different software programs and analyses, including analyses from SignalP and other specialized programs. The variant protein is believed to be located as follows with regard to the cell: secreted. The protein localization is believed to be secreted because of manual inspection of known protein localization and/or gene structure.

[0554] Variant protein HUMHPA1B_PEA_{—}1_P83 (SEQ ID NO:142) also has the following non-silent SNPs (Single Nucleotide Polymorphisms) as listed in Table 34, (given according to their position(s) on the amino acid sequence, with the alternative amino acid(s) listed; the last column indicates whether the SNP is known or not; the presence of known SNPs in variant protein HUMHPA1B_PEA_{—}1_P83 (SEQ ID NO:142) Sequence provides support for the deduced sequence of this variant protein according to the present invention).

TABLE 34
Amino acid mutations

| SNP position(s) on amino acid | Alternative | Previously |
|---|---|---|
| sequence | amino acid(s) | known SNP? |
| 8 | I -> | No |

[0555] The glycosylation sites of variant protein HUMHPA1B_PEA_{—}1_P83 (SEQ ID NO:142), as compared to the known protein Haptoglobin precursor (SEQ ID NO:131), are described in Table 35 (given according to their position(s) on the amino acid sequence in the first column; the second column indicates whether the glycosylation site is present in the variant protein; and the last column indicates whether the position is different on the variant protein).

TABLE 35
Glycosylation site(s)

| Position(s) on known amino | Present in |
|---|---|
| acid sequence | variant protein? |
| 207 | no |
| 241 | no |
| 184 | no |
| 211 | no |

[0556] Variant protein HUMHPA1B_PEA_{—}1_P83 (SEQ ID NO:142) is encoded by the following transcript(s): HUMHPA1B_PEA_{—}1_T29 (SEQ ID NO:43), for which the sequence(s) is/are given at the end of the application. The coding portion of transcript HUMHPA1B_PEA_{—}1_T29 (SEQ ID NO:43) is shown in bold; this coding portion starts at position 68 and ends at position 169. The transcript also has the following SNPs as listed in Table 36 (given according to their position on the nucleotide sequence, with the alternative nucleic acid listed; the last column indicates whether the SNP is known or not; the presence of known SNPs in variant protein HUMHPA1B_PEA_{—}1_P83 (SEQ ID NO:142) Sequence provides support for the deduced sequence of this variant protein according to the present invention).

TABLE 36
Nucleic acid SNPs

| SNP position on | Alternative | Previously |
|---|---|---|
| nucleotide sequence | nucleic acid | known SNP? |
| 40 | T -> G | No |
| 77 | C -> T | No |
| 90 | T -> | No |
| 185 | T -> C | Yes |
| 185 | T -> G | Yes |
| 205 | A -> | No |
| 278 | T -> C | No |
| 281 | -> G | No |
| 282 | T -> G | No |
| 320 | T -> C | No |
| 326 | G -> | No |
| 348 | T -> C | Yes |
| 353 | G -> A | No |
| 378 | A -> | No |
| 425 | T -> A | No |
| 523 | T -> C | No |
| 557 | T -> C | No |
| 577 | C -> T | No |
| 617 | -> C | No |
| 644 | T -> C | No |
| 660 | -> C | No |
| 686 | G -> | No |
| 686 | G -> C | No |
| 709 | -> C | No |
| 724 | -> C | No |
| 805 | -> C | No |
| 872 | A -> C | No |
| 873 | A -> G | No |
| 966 | -> G | No |
| 966 | -> T | No |

[0557] Variant protein HUMHPA1B_PEA_{—}1_P106 (SEQ ID NO:143) according to the present invention has an amino acid sequence as given at the end of the application; it is encoded by transcript(s) HUMHPA1B_PEA_{—}1_T55 (SEQ ID NO:44. An alignment is given to the known protein (Haptoglobin precursor (SEQ ID NO:131)) at the end of the application. One or more alignments to one or more previously published protein sequences are given at the end of the application. A brief description of the relationship of the variant protein according to the present invention to each such aligned protein is as follows:

[0558] Comparison report between HUMHPA1B_PEA_{—}1_P106 (SEQ ID NO:143) and HPT_HUMAN_V1 (SEQ ID NO:132) (SEQ ID NO:132):

[0559] 1. An isolated chimeric polypeptide encoding for HUMHPA1B_PEA_{—}1_P106 (SEQ ID NO:143), comprising a first amino acid sequence being at least 90% homologous to MSALGAVIALLLWGQLFAVDSGNDVTDIADDGCPKPPEIAHGYVEHSVRYQCKNYYK LRTEGDGVYTLNN corresponding to amino acids 1-70 of HPT_HUMAN_V1 (SEQ ID NO:132), which also corresponds to amino acids 1-70 of HUMHPA1B_PEA_{—}1_P106 (SEQ ID NO:143), a bridging amino acid E corresponding to amino acid 71 of HUMHPA1B_PEA_{—}1_P106 (SEQ ID NO:143), a bridging amino acid E corresponding to amino acid 71 of HUMHPA1B_PEA_{—}1_P106 (SEQ ID NO:143), a second amino acid sequence being at least 90% homologous to KQWINKAVGDKLPECEA corresponding to amino acids 72-88 of HPT_HUMAN_V1 (SEQ ID NO:132), which also corresponds to amino acids 72-88 of HUMHPA1B_PEA_{—}1_P106 (SEQ ID NO:143), and a third amino acid sequence being at least 70%, optionally at least 80%, preferably at least 85%, more preferably at least 90% and most preferably at least 95% homologous to a polypeptide having the sequence AHTE (SEQ ID NO:499) corresponding to amino acids 89-92 of HUMHPA1B_PEA_{—}1_P106 (SEQ ID NO:143), wherein said first amino acid sequence, bridging amino acid, bridging amino acid, second amino acid sequence and third amino acid sequence are contiguous and in a sequential order.

[0560] 2. An isolated polypeptide encoding for a tail of HUMHPA1B_PEA_{—}1_P106 (SEQ ID NO:143), comprising a polypeptide being at least 70%, optionally at least about 80%, preferably at least about 85%, more preferably at least about 90% and most preferably at least about 95% homologous to the sequence AHTE (SEQ ID NO:499) in HUMHPA1B_PEA_{—}1_P106 (SEQ ID NO:143).

[0561] It should be noted that the known protein sequence (HPT_HUMAN) Has one or more changes than the sequence given at the end of the application and named as being the amino acid sequence for HPT_HUMAN_V1 (SEQ ID NO:132) (SEQ ID NO:132). These changes were previously known to occur and are listed in the table below.

TABLE 37
Changes to HPT_HUMAN_V1 (SEQ ID NO: 132)

| SNP position(s) on | |
|---|---|
| amino acid sequence | Type of change |
| 71 | conflict |

[0562] The location of the variant protein was determined according to results from a number of different software programs and analyses, including analyses from SignalP and other specialized programs. The variant protein is believed to be located as follows with regard to the cell: secreted. The protein localization is believed to be secreted because of manual inspection of known protein localization and/or gene structure.

[0563] Variant protein HUMHPA1B_PEA_{—}1_P106 (SEQ ID NO:143) also has the following non-silent SNPs (Single Nucleotide Polymorphisms) as listed in Table 38, (given according to their position(s) on the amino acid sequence, with the alternative amino acid(s) listed; the last column indicates whether the SNP is known or not; the presence of known SNPs in variant protein HUMHPA1B_PEA_{—}1_P106 (SEQ ID NO:143) Sequence provides support for the deduced sequence of this variant protein according to the present invention).

TABLE 38
Amino acid mutations

| SNP position(s) on | Alternative | Previously |
|---|---|---|
| amino acid sequence | amino acid(s) | known SNP? |
| 8 | I -> | No |
| 38 | E -> D | No |
| 71 | E -> G | No |
| 71 | E -> K | No |

[0564] Variant protein HUMHPA1B_PEA_{—}1_P106 (SEQ ID NO:143) is encoded by the following transcript(s): HUMHPA1B_PEA_{—}1_T55 (SEQ ID NO:44), for which the sequence(s) is/are given at the end of the application. The coding portion of transcript HUMHPA1B_PEA_{—}1_T55 (SEQ ID NO:44) is shown in bold; this coding portion starts at position 68 and ends at position 343. The transcript also has the following SNPs as listed in Table 39 (given according to their position on the nucleotide sequence, with the alternative nucleic acid listed; the last column indicates whether the SNP is known or not; the presence of known SNPs in variant protein HUMHPA1B_PEA_{—}1_P106 (SEQ ID NO:143) Sequence provides support for the deduced sequence of this variant protein according to the present invention).

TABLE 39
Nucleic acid SNPs

| SNP position on | Alternative | Previously |
|---|---|---|
| nucleotide sequence | nucleic acid | known SNP? |
| 40 | T -> G | No |
| 77 | C -> T | No |
| 90 | T -> | No |
| 181 | G -> T | No |
| 262 | G -> A | Yes |
| 278 | G -> A | No |
| 279 | A -> G | No |
| 304 | -> G | No |
| 335 | -> C | No |
| 362 | T -> C | No |
| 378 | -> C | No |
| 404 | G -> | No |
| 404 | G -> C | No |
| 427 | -> C | No |
| 442 | -> C | No |
| 523 | -> C | No |
| 590 | A -> C | No |
| 591 | A -> G | No |
| 684 | -> G | No |
| 684 | -> T | No |

[0565] Variant protein HUMHPA1B_PEA_{—}1_P107 (SEQ ID NO:144)) according to the present invention has an amino acid sequence as given at the end of the application; it is encoded by transcript(s) HUMHPA1B_PEA_{—}1_T56 (SEQ ID NO:45). An alignment is given to the known protein (Haptoglobin precursor (SEQ ID NO:131)) at the end of the application. One or more alignments to one or more previously published protein sequences are given at the end of the application. A brief description of the relationship of the variant protein according to the present application to each such aligned protein is as follows:

[0566] Comparison report between HUMHPA1B_PEA_{—}1_P107 (SEQ ID NO:144)) and HPT_HUMAN:

[0567] 1. An isolated chimeric polypeptide encoding for HUMHPA1B_PEA_{—}1_P107 (SEQ ID NO:144)), comprising a first amino acid sequence being at least 90% homologous to MSALGAVIALLLWGQLFAVDSGNDVTDI corresponding to amino acids 1-28 of HPT_HUMAN, which also corresponds to amino acids 1-28 of HUMHPA1B_PEA_{—}1_P107 (SEQ ID NO:144)), a second amino acid sequence being at least 90% homologous to ADDGCPKPPEIAHGYVEHSVRYQCKNYYKLRTEGDGVYTLNNEKQWINKAVGDKLPE CEAVCGKPKNPANPVQRILGGHLDAKGSFPWQAKMVSHHNLTT corresponding to amino acids 88-187 of HPT_HUMAN, which also corresponds to amino acids 29-128 of HUMHPA1B_PEA_{—}1_P107 (SEQ ID NO:144)), and a third amino acid sequence being at least 70%, optionally at least 80%, preferably at least 85%, more preferably at least 90% and most preferably at least 95% homologous to a polypeptide having the sequence VPLPFTTWRRTPGMRLGS (SEQ ID NO:500) corresponding to amino acids 129-146 of HUMHPA1B_PEA_{—}1_P107 (SEQ ID NO:144), wherein said first amino acid sequence, second amino acid sequence and third amino acid sequence are contiguous and in a sequential order.

[0568] 2. An isolated chimeric polypeptide encoding for an edge portion of HUMHPA1B_PEA_{—}1_P107 (SEQ ID NO:144), comprising a polypeptide having a length “n”, wherein n is at least about 10 amino acids in length, optionally at least about 20 amino acids in length, preferably at least about 30 amino acids in length, more preferably at least about 40 amino acids in length and most preferably at least about 50 amino acids in length, wherein at least two amino acids comprise IA, having a structure as follows: a sequence starting from any of amino acid numbers 28−x to 28; and ending at any of amino acid numbers 29+((n−2)−x), in which x varies from 0 to n−2.

[0569] 3. An isolated polypeptide encoding for a tail of HUMHPA1B_PEA_{—}1_P107 (SEQ ID NO:144), comprising a polypeptide being at least 70%, optionally at least about 80%, preferably at least about 85%, more preferably at least about 90% and most preferably at least about 95% homologous to the sequence VPLPFTTWRRTPGMRLGS (SEQ ID NO:500) in HUMHPA1B_PEA_{—}1_P107 (SEQ ID NO:144)

[0570] The location of the variant protein was determined according to results from a number of different software programs and analyses, including analyses from SignalP and other specialized programs. The variant protein is believed to be located as follows with regard to the cell: secreted. The protein localization is believed to be secreted because of manual inspection of known protein localization and/or gene structure.

[0571] Variant protein HUMHPA1B_PEA_{—}1_P107 (SEQ ID NO:144)) also has the following non-silent SNPs (Single Nucleotide Polymorphisms) as listed in Table 40, (given according to their position(s) on the amino acid sequence, with the alternative amino acid(s) listed; the last column indicates whether the SNP is known or not; the presence of known SNPs in variant protein HUMHPA1B_PEA_{—}1_P_{—}107 (SEQ ID NO:144)) Sequence provides support for the deduced sequence of this variant protein according to the present invention).

TABLE 40
Amino acid mutations

| SNP position(s) on | Alternative | Previously |
|---|---|---|
| amino acid sequence | amino acid(s) | known SNP? |
| 8 | I -> | No |
| 38 | E -> D | No |
| 71 | E -> G | No |
| 71 | E -> K | No |
| 108 | L -> V | No |

[0572] The glycosylation sites of variant protein HUMHPA1B_PEA_{—}1_P_{—}107 (SEQ ID NO:144), as compared to the known protein Haptoglobin precursor (SEQ ID NO:131), are described in Table 41 (given according to their position(s) on the amino acid sequence in the first column; the second column indicates whether the glycosylation site is present in the variant protein; and the last column indicates whether the position is different on the variant protein).

TABLE 41
Glycosylation site(s)

| Position(s) on known | Present in | Position in |
|---|---|---|
| amino acid sequence | variant protein? | variant protein? |
| 207 | no | |
| 241 | no | |
| 184 | yes | 125 |
| 211 | no | |

[0573] Variant protein HUMHPA1B_PEA_{—}1_P107 (SEQ ID NO:144) is encoded by the following transcript(s): HUMHPA1B_PEA_{—}1_T56 (SEQ ID NO:45), for which the sequence(s) is/are given at the end of the application. The coding portion of transcript HUMHPA1B_PEA_{—}1_T56 (SEQ ID NO:45) is shown in bold; this coding portion starts at position 68 and ends at position 505. The transcript also has the following SNPs as listed in Table 42 (given according to their position on the nucleotide sequence, with the alternative nucleic acid listed; the last column indicates whether the SNP is known or not; the presence of known SNPs in variant protein HUMHPA1B_PEA_{—}1_P107 (SEQ ID NO:144) Sequence provides support for the deduced sequence of this variant protein according to the present invention).

TABLE 42
Nucleic acid SNPs

| SNP position on | Alternative | Previously |
|---|---|---|
| nucleotide sequence | nucleic acid | known SNP? |
| 40 | T -> G | No |
| 77 | C -> T | No |
| 90 | T -> | No |
| 181 | G -> T | No |
| 262 | G -> A | Yes |
| 278 | G -> A | No |
| 279 | A -> G | No |
| 304 | -> G | No |
| 337 | -> G | No |
| 389 | C -> G | No |
| 470 | -> C | No |
| 485 | -> C | No |
| 566 | -> C | No |
| 633 | A -> C | No |
| 634 | A -> G | No |
| 727 | -> G | No |
| 727 | -> T | No |

[0574] Variant protein HUMHPA1B_PEA_{—}1_P115 (SEQ ID NO:145) according to the present invention has an amino acid sequence as given at the end of the application; it is encoded by transcript(s) HUMHPA1B_PEA_{—}1_T59 (SEQ ID NO:46). An alignment is given to the known protein (Haptoglobin precursor (SEQ ID NO:131)) at the end of the application. One or more alignments to one or more previously published protein sequences are given at the end of the application. A brief description of the relationship of the variant protein according to the present invention to each such aligned protein is as follows:

[0575] Comparison report between HUMHPA1B_PEA_{—}1_P115 (SEQ ID NO:145) and HPT_HUMAN:

[0576] 1. An isolated chimeric polypeptide encoding for HUMHPA1B_PEA_{—}1_P115 (SEQ ID NO:145), comprising a first amino acid sequence being at least 90% homologous to MSALGAVIALLLWGQLFAVDSGNDVTDIADDGCPKPPEIAHGYVEHSVRYQCKNYYK LRTEGDGVYTLNDKKQWINKAVGDKLPECEA corresponding to amino acids 1-88 of HPT_HUMAN, which also corresponds to amino acids 1-88 of HUMHPA1B_PEA_{—}1_P115 (SEQ ID NO:145), and a second amino acid sequence being at least 70%, optionally at least 80%, preferably at least 85%, more preferably at least 90% and most preferably at least 95% homologous to a polypeptide having the sequence GGC corresponding to amino acids 89-91 of HUMHPA1B_PEA_{—}1_P115 (SEQ ID NO:145), wherein said first amino acid sequence and second amino acid sequence are contiguous and in a sequential order.

[0577] The location of the variant protein was determined according to results from a number of different software programs and analyses, including analyses from SignalP and other specialized programs. The variant protein is believed to be located as follows with regard to the cell: secreted. The protein localization is believed to be secreted because of manual inspection of known protein localization and/or gene structure.

[0578] Variant protein HUMHPA1B_PEA_{—}1_P115 (SEQ ID NO:145) also has the following non-silent SNPs (Single Nucleotide Polymorphisms) as listed in Table 43, (given according to their position(s) on the amino acid sequence, with the alternative amino acid(s) listed; the last column indicates whether the SNP is known or not; the presence of known SNPs in variant protein HUMHPA1B_PEA_{—}1_P115 (SEQ ID NO:145) Sequence provides support for the deduced sequence of this variant protein according to the present invention).

TABLE 43
Amino acid mutations

| SNP position(s) on | Alternative | Previously |
|---|---|---|
| amino acid sequence | amino acid(s) | known SNP? |
| 8 | I -> | No |
| 38 | E -> D | No |
| 79 | V -> | No |

[0579] The glycosylation sites of variant protein HUMHPA1B_PEA_{—}1_P115 (SEQ ID NO:145), as compared to the known protein Haptoglobin precursor (SEQ ID NO:131), are described in Table 44 (given according to their position(s) on the amino acid sequence in the first column; the second column indicates whether the glycosylation site is present in the variant protein; and the last column indicates whether the position is different on the variant protein).

TABLE 44
Glycosylation site(s)

| Position(s) on known | Present in |
|---|---|
| amino acid sequence | variant protein? |
| 207 | no |
| 241 | no |
| 184 | no |
| 211 | no |

[0580] Variant protein HUMHPA1B_PEA_{—}1_P115 (SEQ ID NO:145) is encoded by the following transcript(s): HUMHPA1B_PEA_{—}1_T59 (SEQ ID NO:46), for which the sequence(s) is/are given at the end of the application. The coding portion of transcript HUMHPA1B_PEA_{—}1_T59 (SEQ ID NO:46) is shown in bold; this coding portion starts at position 68 and ends at position 340. The transcript also has the following SNPs as listed in Table 45 (given according to their position on the nucleotide sequence, with the alternative nucleic acid listed; the last column indicates whether the SNP is known or not; the presence of known SNPs in variant protein HUMHPA1B_PEA_{—}1_P115 (SEQ ID NO:145) Sequence provides support for the deduced sequence of this variant protein according to the present invention).

TABLE 45
Nucleic acid SNPs

| SNP position on | Alternative | Previously |
|---|---|---|
| nucleotide sequence | nucleic acid | known SNP? |
| 40 | T -> G | No |
| 77 | C -> T | No |
| 90 | T -> | No |
| 181 | G -> T | No |
| 303 | T -> | No |
| 510 | G -> A | Yes |
| 560 | C -> T | Yes |
| 581 | C -> T | Yes |
| 615 | A -> G | Yes |

[0581] As noted above, cluster HUMHPA1B features 84 segment(s), which were listed in Table 2 above and for which the sequence(s) are given at the end of the application. These segment(s) are portions of nucleic acid sequence(s) which are described herein separately because they are of particular interest. A description of each segment according to the present invention is now provided.

[0582] Segment cluster HUMHPA1B_PEA_{—}_node_{—}20 (SEQ ID NO:47) according to the present invention is supported by 4 libraries. The number of libraries was determined as previously described. This segment can be found in the following transcript(s): HUMHPA1B_PEA_{—}1_T4 (SEQ ID NO:35). Table 46 below describes the starting and ending position of this segment on each transcript.

TABLE 46
Segment location on transcripts

| | Segment | Segment |
|---|---|---|
| Transcript name | starting position | ending position |
| HUMHPA1B_PEA_1_T4 (SEQ ID | 258 | 1017 |
| NO: 35) | | |

[0583] Segment cluster HUMHPA1B_PEA_{—}1_node_{—}25 (SEQ ID NO:48) according to the present invention is supported by 2 libraries. The number of libraries was determined as previously described. This segment can be found in the following transcript(s): HUMHPA1B_PEA_{—}1_T59 (SEQ ID NO:46). Table 47 below describes the starting and ending position of this segment on each transcript.

TABLE 47
Segment location on transcripts

| | Segment | Segment |
|---|---|---|
| Transcript name | starting position | ending position |
| HUMHPA1B_PEA_1_T59 | 333 | 920 |
| (SEQ ID NO: 46) | | |

[0584] Segment cluster HUMHPA1B_PEA_{—}1_node_{—}28 (SEQ ID NO:49) according to the present invention is supported by 7 libraries. The number of libraries was determined as previously described. This segment can be found in the following transcript(s): HUMHPA1B_PEA_{—}1_T6 (SEQ ID NO:36). Table 48 below describes the starting and ending position of this segment on each transcript.

TABLE 48
Segment location on transcripts

| | Segment | Segment |
|---|---|---|
| Transcript name | starting position | ending position |
| HUMHPA1B_PEA_1_T6 (SEQ ID | 435 | 1192 |
| NO: 36) | | |

[0585] Segment cluster HUMHPA1B_PEA_{—}1_node_{—}35 (SEQ ID NO:50) according to the present invention is supported by 9 libraries. The number of libraries was determined as previously described. This segment can be found in the following transcript(s): HUMHPA1B_PEA_{—}1_T7 (SEQ ID NO:37). Table 49 below describes the starting and ending position of this segment on each transcript.

TABLE 49
Segment location on transcripts

| | Segment | Segment |
|---|---|---|
| Transcript name | starting position | ending position |
| HUMHPA1B_PEA_1_T7 (SEQ ID | 524 | 1432 |
| NO: 37) | | |

[0586] Segment cluster HUMHPA1B_PEA_{—}1_node_{—}88 (SEQ ID NO:51) according to the present invention is supported by 95 libraries. The number of libraries was determined as previously described. This segment can be found in the following transcript(s): HUMHPA1B_PEA_{—}1_T1 (SEQ ID NO:34), HUMHPA1_PEA_{—}1_T4 (SEQ ID NO:35), HUMHPA1B_PEA_{—}1_T6 (SEQ ID NO:36), HUMHPA1B_PEA_{—}1_T7 (SEQ ID NO:37), HUMHPA1B_PEA_{—}1_T12 (SEQ ID NO:38), HUMHPA1B_PEA_{—}1_T16 (SEQ ID NO:39), HUMHPA1B_PEA_{—}1_T19 (SEQ ID NO:40), HUMHPA1B_PEA_{—}1_T20 (SEQ ID NO:41), HUMHPA1B_PEA_{—}1_T27 (SEQ ID NO:42), HUMHPA1B_PEA_{—}1_T29 (SEQ ID NO:43, HUMHPA1B_PEA_{—}1_T55 (SEQ ID NO:44) and HUMHPA1B_PEA_{—}1_T56 (SEQ ID NO:45). Table 50 below describes the starting and ending position of this segment on each transcript.

TABLE 50
Segment location on transcripts

| | | Segment |
|---|---|---|
| | Segment | ending |
| Transcript name | starting position | position |
| HUMHPA1B_PEA_1_T1 (SEQ ID | 1155 | 1276 |
| NO: 34) | | |
| HUMHPA1B_PEA_1_T4 (SEQ ID | 2092 | 2213 |
| NO: 35) | | |
| HUMHPA1B_PEA_1_T6 (SEQ ID | 2090 | 2211 |
| NO: 36) | | |
| HUMHPA1B_PEA_1_T7 (SEQ ID | 2255 | 2376 |
| NO: 37) | | |
| HUMHPA1B_PEA_1_T12 (SEQ ID | 1155 | 1276 |
| NO: 38) | | |
| HUMHPA1B_PEA_1_T16 (SEQ ID | 1063 | 1184 |
| NO: 39) | | |
| HUMHPA1B_PEA_1_T19 (SEQ ID | 1212 | 1333 |
| NO: 40) | | |
| HUMHPA1B_PEA_1_T20 (SEQ ID | 1011 | 1132 |
| NO: 41) | | |
| HUMHPA1B_PEA_1_T27 (SEQ ID | 1035 | 1156 |
| NO: 42) | | |
| HUMHPA1B_PEA_1_T29 (SEQ ID | 886 | 1007 |
| NO: 43) | | |
| HUMHPA1B_PEA_1_T55 (SEQ ID | 604 | 725 |
| NO: 44) | | |
| HUMHPA1B_PEA_1_T56 (SEQ ID | 647 | 768 |
| NO: 45) | | |

[0587] According to an optional embodiment of the present invention, short segments related to the above cluster are also provided. These segments are up to about 120 bp in length, and so are included in a separate description.

[0588] Segment cluster HUMHPA1B_PEA_{—}1_node_{—}0 (SEQ ID NO:52) according to the present invention is supported by 45 libraries. The number of libraries was determined as previously described. This segment can be found in the following transcript(s): HUMHPA1B_PEA_{—}1_T1 (SEQ ID NO:34), HUMHPA1B_PEA_{—}1_T4 (SEQ ID NO:35, HUMHPA1B_PEA_{—}1_T6 (SEQ ID NO:36), HUMHPA1B_PEA_{—}1_T7 (SEQ ID NO:37, HUMHPA1B_PEA_{—}1_T12 (SEQ ID NO:38), HUMHPA1B_PEA_{—}1_T16 (SEQ ID NO:39), HUMHPA1B_PEA_{—}1_T19 (SEQ ID NO:40), HUMHPA1B_PEA_{—}1_T20 (SEQ ID NO:41), HUMHPA1B_PEA_{—}1_T27 (SEQ ID NO:42), HUMHPA1B_PEA_{—}1_T29 (SEQ ID NO:43), HUMHPA1B_PEA_{—}1_T55 (SEQ ID NO:44), HUMHPA1B_PEA_{—}1_T56 (SEQ ID NO:45) and HUMHPA1B_PEA_{—}1_T59 (SEQ ID NO:46). Table 51 below describes the starting and ending position of this segment on each transcript.

TABLE 51
Segment location on transcripts

| | | Segment |
|---|---|---|
| | Segment | ending |
| Transcript name | starting position | position |
| HUMHPA1B_PEA_1_T1 (SEQ ID | 1 | 63 |
| NO: 34) | | |
| HUMHPA1B_PEA_1_T4 (SEQ ID | 1 | 63 |
| NO: 35) | | |
| HUMHPA1B_PEA_1_T6 (SEQ ID | 1 | 63 |
| NO: 36) | | |
| HUMHPA1B_PEA_1_T7 (SEQ ID | 1 | 63 |
| NO: 37) | | |
| HUMHPA1B_PEA_1_T12 (SEQ ID | 1 | 63 |
| NO: 38) | | |
| HUMHPA1B_PEA_1_T16 (SEQ ID | 1 | 63 |
| NO: 39) | | |
| HUMHPA1B_PEA_1_T19 (SEQ ID | 1 | 63 |
| NO: 40) | | |
| HUMHPA1B_PEA_1_T20 (SEQ ID | 1 | 63 |
| NO: 41) | | |
| HUMHPA1B_PEA_1_T27 (SEQ ID | 1 | 63 |
| NO: 42) | | |
| HUMHPA1B_PEA_1_T29 (SEQ ID | 1 | 63 |
| NO: 43) | | |
| HUMHPA1B_PEA_1_T55 (SEQ ID | 1 | 63 |
| NO: 44) | | |
| HUMHPA1B_PEA_1_T56 (SEQ ID | 1 | 63 |
| NO: 45) | | |
| HUMHPA1B_PEA_1_T59 (SEQ ID | 1 | 63 |
| NO: 46) | | |

[0589] Segment cluster HUMHPA1B_PEA_{—}1_node_{—}1 (SEQ ID NO:53) according to the present invention can be found in the following transcript(s): HUMHPA1B_PEA_{—}1_T1 (SEQ ID NO:34), HUMHPA1B_PEA_{—}1_T4 (SEQ ID NO:35), HUMHPA1B_PEA_{—}1_T6 (SEQ ID NO:36), HUMHPA1B_PEA_{—}1_T7 (SEQ ID NO:37), HUMHPA1B_PEA_{—}1_T12 (SEQ ID NO:38), HUMHPA1B_PEA_{—}1_T16 (SEQ ID NO:39), HUMHPA1B_PEA_{—}1_T19 (SEQ ID NO:40), HUMHPA1B_PEA_{—}1_T20 (SEQ ID NO:41), HUMHPA1B_PEA_{—}1_T27 (SEQ ID NO:42), HUMHPA1B_PEA_{—}1_T29 (SEQ ID NO:43, HUMHPA1B_PEA_{—}1_T55 (SEQ ID NO:44), HUMHPA1B_PEA_{—}1_T56 (SEQ ID NO:45) and HUMHPA1B_PEA_{—}1_T59 (SEQ ID NO:46). Table 52 below describes the starting and ending position of this segment on each transcript.

TABLE 52
Segment location on transcripts

| | | Segment |
|---|---|---|
| | Segment | ending |
| Transcript name | starting position | position |
| HUMHPA1B_PEA_1_T1 (SEQ ID | 64 | 72 |
| NO: 34) | | |
| HUMHPA1B_PEA_1_T4 (SEQ ID | 64 | 72 |
| NO: 35) | | |
| HUMHPA1B_PEA_1_T6 (SEQ ID | 64 | 72 |
| NO: 36) | | |
| HUMHPA1B_PEA_1_T7 (SEQ ID | 64 | 72 |
| NO: 37) | | |
| HUMHPA1B_PEA_1_T12 (SEQ ID | 64 | 72 |
| NO: 38) | | |
| HUMHPA1B_PEA_1_T16 (SEQ ID | 64 | 72 |
| NO: 39) | | |
| HUMHPA1B_PEA_1_T19 (SEQ ID | 64 | 72 |
| NO: 40) | | |
| HUMHPA1B_PEA_1_T20 (SEQ ID | 64 | 72 |
| NO: 41) | | |
| HUMHPA1B_PEA_1_T27 (SEQ ID | 64 | 72 |
| NO: 42) | | |
| HUMHPA1B_PEA_1_T29 (SEQ ID | 64 | 72 |
| NO: 43) | | |
| HUMHPA1B_PEA_1_T55 (SEQ ID | 64 | 72 |
| NO: 44) | | |
| HUMHPA1B_PEA_1_T56 (SEQ ID | 64 | 72 |
| NO: 45) | | |
| HUMHPA1B_PEA_1_T59 (SEQ ID | 64 | 72 |
| NO: 46) | | |

[0590] Segment cluster HUMHPA1B_PEA_{—}1_node_{—}3 (SEQ ID NO:54) according to the present invention can be found in the following transcript(s): HUMHPA1B_PEA I_T1 (SEQ ID NO:34), HUMHPA1B_PEA_{—}1_T4 (SEQ ID NO:35), HUMHPA1B_PEA_{—}1_T6 (SEQ ID NO:36), HUMHPA1B_PEA_{—}_T7 (SEQ ID NO:37), HUMHPA1B_PEA_{—}1_T12 (SEQ ID NO:38), HUMHPA1B_PEA_{—}1_T16 (SEQ ID NO:39), HUMHPA1B_PEA I_T19 (SEQ ID NO:40), HUMHPA1B_PEA_{—}1_T20 (SEQ ID NO:41), HUMHPA1B_PEA_{—}1_T27 (SEQ ID NO:42), HUMHPA1B_PEA_{—}1_T29 (SEQ ID NO:43), HUMHPA1B_PEA_{—}1_T55 (SEQ ID NO:44), HUMHPA1B_PEA_{—}1_T56 (SEQ ID NO:45) and HUMHPA1B_PEA_{—}1_T59 (SEQ ID NO:46). Table 53 below describes the starting and ending position of this segment on each transcript.

TABLE 53
Segment location on transcripts

| | | Segment |
|---|---|---|
| | Segment | ending |
| Transcript name | starting position | position |
| HUMHPA1B_PEA_1_T1 (SEQ ID | 73 | 97 |
| NO: 34) | | |
| HUMHPA1B_PEA_1_T4 (SEQ ID | 73 | 97 |
| NO: 35) | | |
| HUMHPA1B_PEA_1_T6 (SEQ ID | 73 | 97 |
| NO: 36) | | |
| HUMHPA1B_PEA_1_T7 (SEQ ID | 73 | 97 |
| NO: 37) | | |
| HUMHPA1B_PEA_1_T12 (SEQ ID | 73 | 97 |
| NO: 38) | | |
| HUMHPA1B_PEA_1_T16 (SEQ ID | 73 | 97 |
| NO: 39) | | |
| HUMHPA1B_PEA_1_T19 (SEQ ID | 73 | 97 |
| NO: 40) | | |
| HUMHPA1B_PEA_1_T20 (SEQ ID | 73 | 97 |
| NO: 41) | | |
| HUMHPA1B_PEA_1_T27 (SEQ ID | 73 | 97 |
| NO: 42) | | |
| HUMHPA1B_PEA_1_T29 (SEQ ID | 73 | 97 |
| NO: 43) | | |
| HUMHPA1B_PEA_1_T55 (SEQ ID | 73 | 97 |
| NO: 44) | | |
| HUMHPA1B_PEA_1_T56 (SEQ ID | 73 | 97 |
| NO: 45) | | |
| HUMHPA1B_PEA_1_T59 (SEQ ID | 73 | 97 |
| NO: 46) | | |

[0591] Segment cluster HUMHPA1B_PEA_{—}1_node_{—}4 (SEQ ID NO:55) according to the present invention can be found in the following transcript(s): HUMHPA1B_PEA_{—}1_T1 (SEQ ID NO:34), HUMHPA1B_PEA_{—}1_T4 (SEQ ID NO:35, HUMHPA1B_PEA_{—}1_T6 (SEQ ID NO:36), HUMHPA1B_PEA_{—}1_T7 (SEQ ID NO:37), HUMHPA1B_PEA_{—}1_T12 (SEQ ID NO:38), HUMHPA1B_PEA_{—}1_T16 (SEQ ID NO:39), HUMHPA1B_PEA_{—}1_T19 (SEQ ID NO:40), HUMHPA1B_PEA_{—1}_T20 (SEQ ID NO:41), HUMHPA1B_PEA_{—}1_T27 (SEQ ID NO:42), HUMHPA1B_PEA_{—}1_T29 (SEQ ID NO:43), HUMHPA1B_PEA_{—}1_T55 (SEQ ID NO:44), HUMHPA1B_PEA_{—}1_T56 (SEQ ID NO:45) and HUMHPA1B_PEA_{—}1_T59 (SEQ ID NO:46). Table 54 below describes the starting and ending position of this segment on each transcript.

TABLE 54
Segment location on transcripts

| | | Segment |
|---|---|---|
| | Segment | ending |
| Transcript name | starting position | position |
| HUMHPA1B_PEA_1_T1 (SEQ ID | 98 | 112 |
| NO: 34) | | |
| HUMHPA1B_PEA_1_T4 (SEQ ID | 98 | 112 |
| NO: 35) | | |
| HUMHPA1B_PEA_1_T6 (SEQ ID | 98 | 112 |
| NO: 36) | | |
| HUMHPA1B_PEA_1_T7 (SEQ ID | 98 | 112 |
| NO: 37) | | |
| HUMHPA1B_PEA_1_T12 (SEQ ID | 98 | 112 |
| NO: 38) | | |
| HUMHPA1B_PEA_1_T16 (SEQ ID | 98 | 112 |
| NO: 39) | | |
| HUMHPA1B_PEA_1_T19 (SEQ ID | 98 | 112 |
| NO: 40) | | |
| HUMHPA1B_PEA_1_T20 (SEQ ID | 98 | 112 |
| NO: 41) | | |
| HUMHPA1B_PEA_1_T27 (SEQ ID | 98 | 112 |
| NO: 42) | | |
| HUMHPA1B_PEA_1_T29 (SEQ ID | 98 | 112 |
| NO: 43) | | |
| HUMHPA1B_PEA_1_T55 (SEQ ID | 98 | 112 |
| NO: 44) | | |
| HUMHPA1B_PEA_1_T56 (SEQ ID | 98 | 112 |
| NO: 45) | | |
| HUMHPA1B_PEA_1_T59 (SEQ ID | 98 | 112 |
| NO: 46) | | |

[0592] Segment cluster HUMHPA1B_PEA_{—}1_node_{—}5 (SEQ ID NO:56) according to the present invention is supported by 90 libraries. The number of libraries was determined as previously described. This segment can be found in the following transcript(s): HUMHPA1B_PEA_{—}1_T1 (SEQ ID NO:34), HUMHPA1B_PEA_{—}1_T4 (SEQ ID NO:35), HUMHPA1B_PEA_{—}1_T6 (SEQ ID NO:36), HUMHPA1B_PEA_{—}1_T7 (SEQ ID NO:37, HUMHPA1B_PEA_{—}1_T12 (SEQ ID NO:38), HUMHPA1B_PEA_{—}1_T16 (SEQ ID NO:39), HUMHPA1B_PEA_{—}1_T19 (SEQ ID NO:40), HUMHPA1B_PEA_{—}1_T20 (SEQ ID NO:41), HUMHPA1B_PEA_{—}1_T27 (SEQ ID NO:42), HUMHPA1B_PEA_{—}1_T29 (SEQ ID NO:43, HUMHPA1B_PEA_{—}1_T55 (SEQ ID NO:44), HUMHPA1B_PEA_{—}1_T56 (SEQ ID NO:45) and HUMHPA1B_PEA_{—}1_T59 (SEQ ID NO:46). Table 55 below describes the starting and ending position of this segment on each transcript.

TABLE 55
Segment location on transcripts

| | | Segment |
|---|---|---|
| | Segment | ending |
| Transcript name | starting position | position |
| HUMHPA1B_PEA_1_T1 (SEQ ID | 113 | 144 |
| NO: 34) | | |
| HUMHPA1B_PEA_1_T4 (SEQ ID | 113 | 144 |
| NO: 35) | | |
| HUMHPA1B_PEA_1_T6 (SEQ ID | 113 | 144 |
| NO: 36) | | |
| HUMHPA1B_PEA_1_T7 (SEQ ID | 113 | 144 |
| NO: 37) | | |
| HUMHPA1B_PEA_1_T12 (SEQ ID | 113 | 144 |
| NO: 38) | | |
| HUMHPA1B_PEA_1_T16 (SEQ ID | 113 | 144 |
| NO: 39) | | |
| HUMHPA1B_PEA_1_T19 (SEQ ID | 113 | 144 |
| NO: 40) | | |
| HUMHPA1B_PEA_1_T20 (SEQ ID | 113 | 144 |
| NO: 41) | | |
| HUMHPA1B_PEA_1_T27 (SEQ ID | 113 | 144 |
| NO: 42) | | |
| HUMHPA1B_PEA_1_T29 (SEQ ID | 113 | 144 |
| NO: 43) | | |
| HUMHPA1B_PEA_1_T55 (SEQ ID | 113 | 144 |
| NO: 44) | | |
| HUMHPA1B_PEA_1_T56 (SEQ ID | 113 | 144 |
| NO: 45) | | |
| HUMHPA1B_PEA_1_T59 (SEQ ID | 113 | 144 |
| NO: 46) | | |

[0593] Segment cluster HUMHPA1B_PEA_{—}1_node_{—}6 (SEQ ID NO:57) according to the present invention can be found in the following transcript(s): HUMHPA1B_PEA_{—}1_T1 (SEQ ID NO:34), HUMHPA1B_PEA_{—}1_T4 (SEQ ID NO:35), HUMHPA1B_PEA_{—}1_T6 (SEQ ID NO:36), HUMHPA1B_PEA_{—}1_T7 (SEQ ID NO:37, HUMHPA1B_PEA_{—}1_T12 (SEQ ID NO:38), HUMHPA1B_PEA_{—}1_T16 (SEQ ID NO:39), HUMHPA1B_PEA_{—}1_T19 (SEQ ID NO:40), HUMHPA1B_PEA_{—}1_T20 (SEQ ID NO:41), HUMHPA1B_PEA_{—}1_T27 (SEQ ID NO:42), HUMHPA1B_PEA_{—}1_T29 (SEQ ID NO:43), HUMHPA1B_PEA_{—}1_T55 (SEQ ID NO:44), HUMHPA1B_PEA_{—}1_T56 (SEQ ID NO:45 and HUMHPA1B_PEA_{—}1_T59 (SEQ ID NO:46). Table 56 below describes the starting and ending position of this segment on each transcript.

TABLE 56
Segment location on transcripts

| | | Segment |
|---|---|---|
| | Segment | ending |
| Transcript name | starting position | position |
| HUMHPA1B_PEA_1_T1 (SEQ ID | 145 | 150 |
| NO: 34) | | |
| HUMHPA1B_PEA_1_T4 (SEQ ID | 145 | 150 |
| NO: 35) | | |
| HUMHPA1B_PEA_1_T6 (SEQ ID | 145 | 150 |
| NO: 36) | | |
| HUMHPA1B_PEA_1_T7 (SEQ ID | 145 | 150 |
| NO: 37) | | |
| HUMHPA1B_PEA_1_T12 (SEQ ID | 145 | 150 |
| NO: 38) | | |
| HUMHPA1B_PEA_1_T16 (SEQ ID | 145 | 150 |
| NO: 39) | | |
| HUMHPA1B_PEA_1_T19 (SEQ ID | 145 | 150 |
| NO: 40) | | |
| HUMHPA1B_PEA_1_T20 (SEQ ID | 145 | 150 |
| NO: 41) | | |
| HUMHPA1B_PEA_1_T27 (SEQ ID | 145 | 150 |
| NO: 42) | | |
| HUMHPA1B_PEA_1_T29 (SEQ ID | 145 | 150 |
| NO: 43) | | |
| HUMHPA1B_PEA_1_T55 (SEQ ID | 145 | 150 |
| NO: 44) | | |
| HUMHPA1B_PEA_1_T56 (SEQ ID | 145 | 150 |
| NO: 45) | | |
| HUMHPA1B_PEA_1_T59 (SEQ ID | 145 | 150 |
| NO: 46) | | |

[0594] Segment cluster HUMHPA1B_PEA_{—}1_node_{—}7 (SEQ ID NO:58) according to the present invention can be found in the following transcript(s): HUMHPA1B_PEA_{—}1_T1 (SEQ ID NO:34), HUMHPA1B_PEA_{—}1_T4 (SEQ ID NO:35), HUMHPA1B_PEA_{—}1_T6 (SEQ ID NO:36), HUMHPA1B_PEA_{—}1_T7 (SEQ ID NO:37), HUMHPA1B_PEA_{—}1_T12 (SEQ ID NO:38), HUMHPA1B_PEA_{—}1_T16 (SEQ ID NO:39, HUMHPA1B_PEA 1_T19 (SEQ ID NO:40), HUMHPA1B_PEA_{—}1_T20 (SEQ ID NO:41), HUMHPA1B_PEA_{—}1_T27 (SEQ ID NO:42), HUMHPA1B_PEA_{—}1_T29 (SEQ ID NO:43), HUMHPA1B_PEA_{—}1_T55 (SEQ ID NO:44), HUMHPA1B_PEA_{—}1_T56 (SEQ ID NO:45) and HUMHPA1B_PEA_{—}1_T59 (SEQ ID NO:46). Table 57 below describes the starting and ending position of this segment on each transcript.

TABLE 57
Segment location on transcripts

| | | Segment |
|---|---|---|
| | Segment | ending |
| Transcript name | starting position | position |
| HUMHPA1B_PEA_1_T1 (SEQ ID | 151 | 155 |
| NO: 34) | | |
| HUMHPA1B_PEA_1_T4 (SEQ ID | 151 | 155 |
| NO: 35) | | |
| HUMHPA1B_PEA_1_T6 (SEQ ID | 151 | 155 |
| NO: 36) | | |
| HUMHPA1B_PEA_1_T7 (SEQ ID | 151 | 155 |
| NO: 37) | | |
| HUMHPA1B_PEA_1_T12 (SEQ ID | 151 | 155 |
| NO: 38) | | |
| HUMHPA1B_PEA_1_T16 (SEQ ID | 151 | 155 |
| NO: 39) | | |
| HUMHPA1B_PEA_1_T19 (SEQ ID | 151 | 155 |
| NO: 40) | | |
| HUMHPA1B_PEA_1_T20 (SEQ ID | 151 | 155 |
| NO: 41) | | |
| HUMHPA1B_PEA_1_T27 (SEQ ID | 151 | 155 |
| NO: 42) | | |
| HUMHPA1B_PEA_1_T29 (SEQ ID | 151 | 155 |
| NO: 43) | | |
| HUMHPA1B_PEA_1_T55 (SEQ ID | 151 | 155 |
| NO: 44) | | |
| HUMHPA1B_PEA_1_T56 (SEQ ID | 151 | 155 |
| NO: 45) | | |
| HUMHPA1B_PEA_1_T59 (SEQ ID | 151 | 155 |
| NO: 46) | | |

[0595] Segment cluster HUMHPA1B_PEA_{—}1_node_{—}10 (SEQ ID NO:59) according to the present invention is supported by 95 libraries. The number of libraries was determined as previously described. This segment can be found in the following transcript(s): HUMHPA1B_PEA_{—}1_T1 (SEQ ID NO:34), HUMHPA1B_PEA_{—}1_T4 (SEQ ID NO:35), HUMHPA1B_PEA_{—}1_T6 (SEQ ID NO:36), HUMHPA1B_PEA_{—}1_T7 (SEQ ID NO:37), HUMHPA1B_PEA_{—}1_T12 (SEQ ID NO:38), HUMHPA1B_PEA_{—}1_T16 (SEQ ID NO:39), HUMHPA1B_PEA_{—}1_T19 (SEQ ID NO:40), HUMHPA1B_PEA_{—}1_T20 (SEQ ID NO:41), HUMHPA1B_PEA_{—}1_T27 (SEQ ID NO:42), HUMHPA1B_PEA_{—}1_T55 (SEQ ID NO:44), HUMHPA1B_PEA_{—}1_T56 (SEQ ID NO:45) and HUMHPA1B_PEA_{—}1_T59 (SEQ ID NO:46. Table 58 below describes the starting and ending position of this segment on each transcript.

TABLE 58
Segment location on transcripts

| | Segment | Segment |
|---|---|---|
| | starting | ending |
| Transcript name | position | position |
| HUMHPA1B_PEA_1_T1 (SEQ ID | 156 | 188 |
| NO: 34) | | |
| HUMHPA1B_PEA_1_T4 (SEQ ID | 156 | 188 |
| NO: 35) | | |
| HUMHPA1B_PEA_1_T6 (SEQ ID | 156 | 188 |
| NO: 36) | | |
| HUMHPA1B_PEA_1_T7 (SEQ ID | 156 | 188 |
| NO: 37) | | |
| HUMHPA1B_PEA_1_T12 (SEQ ID | 156 | 188 |
| NO: 38) | | |
| HUMHPA1B_PEA_1_T16 (SEQ ID | 156 | 188 |
| NO: 39) | | |
| HUMHPA1B_PEA_1_T19 (SEQ ID | 156 | 188 |
| NO: 40) | | |
| HUMHPA1B_PEA_1_T20 (SEQ ID | 156 | 188 |
| NO: 41) | | |
| HUMHPA1B_PEA_1_T27 (SEQ ID | 156 | 188 |
| NO: 42) | | |
| HUMHPA1B_PEA_1_T55 (SEQ ID | 156 | 188 |
| NO: 44) | | |
| HUMHPA1B_PEA_1_T56 (SEQ ID | 156 | 188 |
| NO: 45) | | |
| HUMHPA1B_PEA_1_T59 (SEQ ID | 156 | 188 |
| NO: 46) | | |

[0596] Segment cluster HUMHPA1B_PEA_{—}1_node_{—}1 (SEQ ID NO:60) according to the present invention can be found in the following transcript(s): HUMHPA1B_PEA_{—}1_T1 (SEQ ID NO:34), HUMHPA1B_PEA_{—}1_T4 (SEQ ID NO:35), HUMHPA1B_PEA_{—}1_T6 (SEQ ID NO:36), HUMHPA1B_PEA_{—}1_T7 (SEQ ID NO:37), HUMHPA1B_PEA_{—}1_T12 (SEQ ID NO:38), HUMHPA1B_PEA_{—}1_T16 (SEQ ID NO:39), HUMHPA1B_PEA_{—}1_T19 (SEQ ID NO:40), HUMHPA1B_PEA_{—}1_T20 (SEQ ID NO:41), HUMHPA1B_PEA_{—}1_T27 (SEQ ID NO:42), HUMHPA1B_PEA_{—}1_T55 (SEQ ID NO:44, HUMHPA1B_PEA_{—}1_T56 (SEQ ID NO:45) and HUMHPA1B_PEA_{—}1_T59 (SEQ ID NO:46). Table 59 below describes the starting and ending position of this segment on each transcript.

TABLE 59
Segment location on transcripts

| | Segment | Segment |
|---|---|---|
| | starting | ending |
| Transcript name | position | position |
| HUMHPA1B_PEA_1_T1 (SEQ ID | 189 | 192 |
| NO: 34) | | |
| HUMHPA1B_PEA_1_T4 (SEQ ID | 189 | 192 |
| NO: 35) | | |
| HUMHPA1B_PEA_1_T6 (SEQ ID | 189 | 192 |
| NO: 36) | | |
| HUMHPA1B_PEA_1_T7 (SEQ ID | 189 | 192 |
| NO: 37) | | |
| HUMHPA1B_PEA_1_T12 (SEQ ID | 189 | 192 |
| NO: 38) | | |
| HUMHPA1B_PEA_1_T16 (SEQ ID | 189 | 192 |
| NO: 39) | | |
| HUMHPA1B_PEA_1_T19 (SEQ ID | 189 | 192 |
| NO: 40) | | |
| HUMHPA1B_PEA_1_T20 (SEQ ID | 189 | 192 |
| NO: 41) | | |
| HUMHPA1B_PEA_1_T27 (SEQ ID | 189 | 192 |
| NO: 42) | | |
| HUMHPA1B_PEA_1_T55 (SEQ ID | 189 | 192 |
| NO: 44) | | |
| HUMHPA1B_PEA_1_T56 (SEQ ID | 189 | 192 |
| NO: 45) | | |
| HUMHPA1B_PEA_1_T59 (SEQ ID | 189 | 192 |
| NO: 46) | | |

[0597] Segment cluster HUMHPA1B_PEA_{—}1_node_{—}12 (SEQ ID NO:61) according to the present invention can be found in the following transcript(s): HUMHPA1B_PEA_{—}1_T1 (SEQ ID NO:34), HUMHPA1B_PEA_{—}1_T4 (SEQ ID NO:35), HUMHPA1B_PEA_{—}1_T6 (SEQ ID NO:36), HUMHPA1B_PEA_{—}1_T7 (SEQ ID NO:37), HUMHPA1B_PEA_{—}1_T12 (SEQ ID NO:38), HUMHPA1B_PEA_{—}1_T16 (SEQ ID NO:39), HUMHPA1B_PEA_{—}1_T19 (SEQ ID NO:40), HUMHPA1B_PEA_{—}1_T20 (SEQ ID NO:41, HUMHPA1B_PEA_{—}1_T27 (SEQ ID NO:42), HUMHPA1B_PEA_{—}1_T55 (SEQ ID NO:44), HUMHPA1B_PEA_{—}1_T56 (SEQ ID NO:45) and HUMHPA1B_PEA_{—}1_T59 (SEQ ID NO:46. Table 60 below describes the starting and ending position of this segment on each transcript.

TABLE 60
Segment location on transcripts

| | Segment | Segment |
|---|---|---|
| | starting | ending |
| Transcript name | position | position |
| HUMHPA1B_PEA_1_T1 (SEQ ID | 193 | 196 |
| NO: 34) | | |
| HUMHPA1B_PEA_1_T4 (SEQ ID | 193 | 196 |
| NO: 35) | | |
| HUMHPA1B_PEA_1_T6 (SEQ ID | 193 | 196 |
| NO: 36) | | |
| HUMHPA1B_PEA_1_T7 (SEQ ID | 193 | 196 |
| NO: 37) | | |
| HUMHPA1B_PEA_1_T12 (SEQ ID | 193 | 196 |
| NO: 38) | | |
| HUMHPA1B_PEA_1_T16 (SEQ ID | 193 | 196 |
| NO: 39) | | |
| HUMHPA1B_PEA_1_T19 (SEQ ID | 193 | 196 |
| NO: 40) | | |
| HUMHPA1B_PEA_1_T20 (SEQ ID | 193 | 196 |
| NO: 41) | | |
| HUMHPA1B_PEA_1_T27 (SEQ ID | 193 | 196 |
| NO: 42) | | |
| HUMHPA1B_PEA_1_T55 (SEQ ID | 193 | 196 |
| NO: 44) | | |
| HUMHPA1B_PEA_1_T56 (SEQ ID | 193 | 196 |
| NO: 45) | | |
| HUMHPA1B_PEA_1_T59 (SEQ ID | 193 | 196 |
| NO: 46) | | |

[0598] Segment cluster HUMHPA1B_PEA_{—}1_node_{—}13 (SEQ ID NO:62) according to the present invention can be found in the following transcript(s): HUMHPA1B_PEA_{—}1_T1 (SEQ ID NO:34), HUMHPA1B_PEA_{—}1_T4 (SEQ ID NO:35), HUMHPA1B_PEA_{—}1_T6 (SEQ ID NO:36), HUMHPA1B_PEA_{—}1_T7 (SEQ ID NO:37), HUMHPA1B_PEA_{—}1_T12 (SEQ ID NO:38), HUMHPA1B_PEA_{—}1_T16 (SEQ ID NO:39), HUMHPA1B_PEA_{—}1_T19 (SEQ ID NO:40), HUMHPA1B_PEA_{—}1_T20 (SEQ ID NO:41), HUMHPA1B_PEA_{—}1_T27 (SEQ ID NO:42), HUMHPA1B_PEA_{—}1_T55 (SEQ ID NO:44), HUMHPA1B_PEA_{—}1_T56 (SEQ ID NO:45) and HUMHPA1B_PEA_{—}1_T59 (SEQ ID NO:46). Table 61 below describes the starting and ending position of this segment on each transcript.

TABLE 61
Segment location on transcripts

| | Segment | Segment |
|---|---|---|
| | starting | ending |
| Transcript name | position | position |
| HUMHPA1B_PEA_1_T1 (SEQ ID | 197 | 217 |
| NO: 34) | | |
| HUMHPA1B_PEA_1_T4 (SEQ ID | 197 | 217 |
| NO: 35) | | |
| HUMHPA1B_PEA_1_T6 (SEQ ID | 197 | 217 |
| NO: 36) | | |
| HUMHPA1B_PEA_1_T7 (SEQ ID | 197 | 217 |
| NO: 37) | | |
| HUMHPA1B_PEA_1_T12 (SEQ ID | 197 | 217 |
| NO: 38) | | |
| HUMHPA1B_PEA_1_T16 (SEQ ID | 197 | 217 |
| NO: 39) | | |
| HUMHPA1B_PEA_1_T19 (SEQ ID | 197 | 217 |
| NO: 40) | | |
| HUMHPA1B_PEA_1_T20 (SEQ ID | 197 | 217 |
| NO: 41) | | |
| HUMHPA1B_PEA_1_T27 (SEQ ID | 197 | 217 |
| NO: 42) | | |
| HUMHPA1B_PEA_1_T55 (SEQ ID | 197 | 217 |
| NO: 44) | | |
| HUMHPA1B_PEA_1_T56 (SEQ ID | 197 | 217 |
| NO: 45) | | |
| HUMHPA1B_PEA_1_T59 (SEQ ID | 197 | 217 |
| NO: 46) | | |

[0599] Segment cluster HUMHPA1B_PEA-1_node_{—}14 (SEQ ID NO:63) according to the present invention can be found in the following transcript(s): HUMHPA1B_PEA_{—}1_T1 (SEQ ID NO:34), HUMHPA1B_PEA_{—}1_T4 (SEQ ID NO:35), HUMHPA1B_PEA_{—}1_T6 (SEQ ID NO:36), HUMHPA1B_PEA_{—}1_T7 (SEQ ID NO:37, HUMHPA1B_PEA_{—}1_T12 (SEQ ID NO:38), HUMHPA1B_PEA_{—}1_T16 (SEQ ID NO:39), HUMHPA1B_PEA_{—}1_T19 (SEQ ID NO:40), HUMHPA1B_PEA_{—}1_T20 (SEQ ID NO:41), HUMHPA1B_PEA_{—}1_T27 (SEQ ID NO:42), HUMHPA1B_PEA_{—}1_T55 (SEQ ID NO:44, HUMHPA1B_PEA_{—}1_T56 (SEQ ID NO:45) and HUMHPA1B_PEA_{—}1_T59 (SEQ ID NO:46). Table 62 below describes the starting and ending position of this segment on each transcript.

TABLE 62
Segment location on transcripts

| | Segment | Segment |
|---|---|---|
| | starting | ending |
| Transcript name | position | position |
| HUMHPA1B_PEA_1_T1 (SEQ ID | 218 | 221 |
| NO: 34) | | |
| HUMHPA1B_PEA_1_T4 (SEQ ID | 218 | 221 |
| NO: 35) | | |
| HUMHPA1B_PEA_1_T6 (SEQ ID | 218 | 221 |
| NO: 36) | | |
| HUMHPA1B_PEA_1_T7 (SEQ ID | 218 | 221 |
| NO: 37) | | |
| HUMHPA1B_PEA_1_T12 (SEQ ID | 218 | 221 |
| NO: 38) | | |
| HUMHPA1B_PEA_1_T16 (SEQ ID | 218 | 221 |
| NO: 39) | | |
| HUMHPA1B_PEA_1_T19 (SEQ ID | 218 | 221 |
| NO: 40) | | |
| HUMHPA1B_PEA_1_T20 (SEQ ID | 218 | 221 |
| NO: 41) | | |
| HUMHPA1B_PEA_1_T27 (SEQ ID | 218 | 221 |
| NO: 42) | | |
| HUMHPA1B_PEA_1_T55 (SEQ ID | 218 | 221 |
| NO: 44) | | |
| HUMHPA1B_PEA_1_T56 (SEQ ID | 218 | 221 |
| NO: 45) | | |
| HUMHPA1B_PEA_1_T59 (SEQ ID | 218 | 221 |
| NO: 46) | | |

[0600] Segment cluster HUMHPA1B_PEA_{—}1 node_{—}15 (SEQ ID NO:64) according to the present invention can be found in the following transcript(s): HUMHPA1B_PEA_{—}1_T1 (SEQ ID NO:34), HUMHPA1B_PEA_{—}1_T4 (SEQ ID NO:35), HUMHPA1B_PEA_{—}1_T6 (SEQ ID NO:36), HUMHPA1B_PEA_{—}1_T7 (SEQ ID NO:37), HUMHPA1B_PEA_{—}1_T12 (SEQ ID NO:38), HUMHPA1B_PEA_{—}1_T16 (SEQ ID NO:39), HUMHPA1B_PEA_{—}1_T19 (SEQ ID NO:40), HUMHPA1B_PEA_{—}1_T27 (SEQ ID NO:42), HUMHPA1B_PEA_{—}1_T55 (SEQ ID NO:44), HUMHPA1B_PEA_{—}1_T56 (SEQ ID NO:45) and HUMHPA1B_PEA_{—}1_T59 (SEQ ID NO:46). Table 63 below describes the starting and ending position of this segment on each transcript.

TABLE 63
Segment location on transcripts

| | Segment | Segment |
|---|---|---|
| | starting | ending |
| Transcript name | position | position |
| HUMHPA1B_PEA_1_T1 (SEQ ID | 222 | 231 |
| NO: 34) | | |
| HUMHPA1B_PEA_1_T4 (SEQ ID | 222 | 231 |
| NO: 35) | | |
| HUMHPA1B_PEA_1_T6 (SEQ ID | 222 | 231 |
| NO: 36) | | |
| HUMHPA1B_PEA_1_T7 (SEQ ID | 222 | 231 |
| NO: 37) | | |
| HUMHPA1B_PEA_1_T12 (SEQ ID | 222 | 231 |
| NO: 38) | | |
| HUMHPA1B_PEA_1_T16 (SEQ ID | 222 | 231 |
| NO: 39) | | |
| HUMHPA1B_PEA_1_T19 (SEQ ID | 222 | 231 |
| NO: 40) | | |
| HUMHPA1B_PEA_1_T27 (SEQ ID | 222 | 231 |
| NO: 42) | | |
| HUMHPA1B_PEA_1_T55 (SEQ ID | 222 | 231 |
| NO: 44) | | |
| HUMHPA1B_PEA_1_T56 (SEQ ID | 222 | 231 |
| NO: 45) | | |
| HUMHPA1B_PEA_1_T59 (SEQ ID | 222 | 231 |
| NO: 46) | | |

[0601] Segment cluster HUMHPA1B_PEA_{—}1_node_{—}16 (SEQ ID NO:65) according to the present invention can be found in the following transcript(s): HUMHPA1B_PEA_{—1}_T1 (SEQ ID NO:34), HUMHPA1B_PEA_{—}1_T4 (SEQ ID NO:35), HUMHPA1B_PEA_{—}1_T6 (SEQ ID NO:36), HUMHPA1B_PEA_{—}1_T7 (SEQ ID NO:37), HUMHPA1B_PEA_{—}1_T12 (SEQ ID NO:38), HUMHPA1B_PEA_{—}1_T16 (SEQ ID NO:39), HUMHPA1B_PEA_{—}1_T19 (SEQ ID NO:40), HUMHPA1B_PEA_{—}1_T27 (SEQ ID NO:42), HUMHPA1B_PEA_{—}1_T55 (SEQ ID NO:44), HUMHPA1B_PEA_{—}1_T56 (SEQ ID NO:45) and HUMHPA1B_PEA_{—}1_T59 (SEQ ID NO:46). Table 64 below describes the starting and ending position of this segment on each transcript.

TABLE 64
Segment location on transcripts

| | Segment | Segment |
|---|---|---|
| | starting | ending |
| Transcript name | position | position |
| HUMHPA1B_PEA_1_T1 (SEQ ID | 232 | 238 |
| NO: 34) | | |
| HUMHPA1B_PEA_1_T4 (SEQ ID | 232 | 238 |
| NO: 35) | | |
| HUMHPA1B_PEA_1_T6 (SEQ ID | 232 | 238 |
| NO: 36) | | |
| HUMHPA1B_PEA_1_T7 (SEQ ID | 232 | 238 |
| NO: 37) | | |
| HUMHPA1B_PEA_1_T12 (SEQ ID | 232 | 238 |
| NO: 38) | | |
| HUMHPA1B_PEA_1_T16 (SEQ ID | 232 | 238 |
| NO: 39) | | |
| HUMHPA1B_PEA_1_T19 (SEQ ID | 232 | 238 |
| NO: 40) | | |
| HUMHPA1B_PEA_1_T27 (SEQ ID | 232 | 238 |
| NO: 42) | | |
| HUMHPA1B_PEA_1_T55 (SEQ ID | 232 | 238 |
| NO: 44) | | |
| HUMHPA1B_PEA_1_T56 (SEQ ID | 232 | 238 |
| NO: 45) | | |
| HUMHPA1B_PEA_1_T59 (SEQ ID | 232 | 238 |
| NO: 46) | | |

[0602] Segment cluster HUMHPA1B_PEA_{—}1_node_{—}17 (SEQ ID NO:66) according to the present invention can be found in the following transcript(s): HUMHPA1B_PEA_{—}1_T1 (SEQ ID NO:34), HUMHPA1B_PEA_{—}1_T4 (SEQ ID NO:35), HUMHPA1B_PEA_{—}1_T6 (SEQ ID NO:36), HUMHPA1B_PEA_{—}1_T7 (SEQ ID NO:37), HUMHPA1B_PEA_{—}1_T12 (SEQ ID NO:38), HUMHPA1B_PEA_{—}1_T16 (SEQ ID NO:39), HUMHPA1B_PEA_{—}1_T19 (SEQ ID NO:40), HUMHPA1B_PEA_{—}1_T27 (SEQ ID NO:42), HUMHPA1B_PEA_{—}1_T55 (SEQ ID NO:44), HUMHPA1B_PEA_{—}1_T56 (SEQ ID NO:45) and HUMHPA1B_PEA_{—}1_T59 (SEQ ID NO:46). Table 65 below describes the starting and ending position of this segment on each transcript.

TABLE 65
Segment location on transcripts

| | Segment | Segment |
|---|---|---|
| | starting | ending |
| Transcript name | position | position |
| HUMHPA1B_PEA_1_T1 (SEQ ID | 239 | 243 |
| NO: 34) | | |
| HUMHPA1B_PEA_1_T4 (SEQ ID | 239 | 243 |
| NO: 35) | | |
| HUMHPA1B_PEA_1_T6 (SEQ ID | 239 | 243 |
| NO: 36) | | |
| HUMHPA1B_PEA_1_T7 (SEQ ID | 239 | 243 |
| NO: 37) | | |
| HUMHPA1B_PEA_1_T12 (SEQ ID | 239 | 243 |
| NO: 38) | | |
| HUMHPA1B_PEA_1_T16 (SEQ ID | 239 | 243 |
| NO: 39) | | |
| HUMHPA1B_PEA_1_T19 (SEQ ID | 239 | 243 |
| NO: 40) | | |
| HUMHPA1B_PEA_1_T27 (SEQ ID | 239 | 243 |
| NO: 42) | | |
| HUMHPA1B_PEA_1_T55 (SEQ ID | 239 | 243 |
| NO: 44) | | |
| HUMHPA1B_PEA_1_T56 (SEQ ID | 239 | 243 |
| NO: 45) | | |
| HUMHPA1B_PEA_1_T59 (SEQ ID | 239 | 243 |
| NO: 46) | | |

[0603] Segment cluster HUMHPA1B_PEA-1_node_{—}18 (SEQ ID NO:67) according to the present invention can be found in the following transcript(s): HUMHPA1B_PEA_{—}1_T1 (SEQ ID NO:34), HUMHPA1B_PEA_{—}1_T4 (SEQ ID NO:35, HUMHPA1B_PEA_{—}1_T6 (SEQ ID NO:36), HUMHPA1B_PEA_{—}1_T7 (SEQ ID NO:37), HUMHPA1B_PEA_{—}1_T12 (SEQ ID NO:38), HUMHPA1B_PEA_{—}1_T16 (SEQ ID NO:39), HUMHPA1B_PEA_{—}1_T19 (SEQ ID NO:40), HUMHPA1B_PEA_{—}1_T27 (SEQ ID NO:42, HUMHPA1B_PEA_{—}1_T55 (SEQ ID NO:44), HUMHPA1B_PEA_{—}1_T56 (SEQ ID NO:45) and HUMHPA1B_PEA_{—}1_T59 (SEQ ID NO:46). Table 66 below describes the starting and ending position of this segment on each transcript.

TABLE 66
Segment location on transcripts

| | Segment | Segment |
|---|---|---|
| | starting | ending |
| Transcript name | position | position |
| HUMHPA1B_PEA_1_T1 (SEQ ID | 244 | 247 |
| NO: 34) | | |
| HUMHPA1B_PEA_1_T4 (SEQ ID | 244 | 247 |
| NO: 35) | | |
| HUMHPA1B_PEA_1_T6 (SEQ ID | 244 | 247 |
| NO: 36) | | |
| HUMHPA1B_PEA_1_T7 (SEQ ID | 244 | 247 |
| NO: 37) | | |
| HUMHPA1B_PEA_1_T12 (SEQ ID | 244 | 247 |
| NO: 38) | | |
| HUMHPA1B_PEA_1_T16 (SEQ ID | 244 | 247 |
| NO: 39) | | |
| HUMHPA1B_PEA_1_T19 (SEQ ID | 244 | 247 |
| NO: 40) | | |
| HUMHPA1B_PEA_1_T27 (SEQ ID | 244 | 247 |
| NO: 42) | | |
| HUMHPA1B_PEA_1_T55 (SEQ ID | 244 | 247 |
| NO: 44) | | |
| HUMHPA1B_PEA_1_T56 (SEQ ID | 244 | 247 |
| NO: 45) | | |
| HUMHPA1B_PEA_1_T59 (SEQ ID | 244 | 247 |
| NO: 46) | | |

[0604] Segment cluster HUMHPA1B_PEA_{—}1_node_{—}19 (SEQ ID NO:68) according to the present invention can be found in the following transcript(s): HUMHPA1B_PEA_{—}1_T1 (SEQ ID NO:34), HUMHPA1B_PEA_{—}1_T4 (SEQ ID NO:35), HUMHPA1B_PEA_{—}1_T6 (SEQ ID NO:36), HUMHPA1B_PEA_{—}1_T7 (SEQ ID NO:37), HUMHPA1B_PEA_{—}1_T12 (SEQ ID NO:38), HUMHPA1B_PEA_{—}1_T16 (SEQ ID NO:39), HUMHPA1B_PEA_{—}1_T19 (SEQ ID NO:40), HUMHPA1B_PEA_{—}1_T27 (SEQ ID NO:42), HUMHPA1B_PEA_{—}1_T55 (SEQ ID NO:44), HUMHPA1B_PEA_{—}1_T56 (SEQ ID NO:45) and HUMHPA1B_PEA_{—}1_T59 (SEQ ID NO:46). Table 67 below describes the starting and ending position of this segment on each transcript.

TABLE 67
Segment location on transcripts

| | Segment | Segment |
|---|---|---|
| | starting | ending |
| Transcript name | position | position |
| HUMHPA1B_PEA_1_T1 (SEQ ID | 248 | 257 |
| NO: 34) | | |
| HUMHPA1B_PEA_1_T4 (SEQ ID | 248 | 257 |
| NO: 35) | | |
| HUMHPA1B_PEA_1_T6 (SEQ ID | 248 | 257 |
| NO: 36) | | |
| HUMHPA1B_PEA_1_T7 (SEQ ID | 248 | 257 |
| NO: 37) | | |
| HUMHPA1B_PEA_1_T12 (SEQ ID | 248 | 257 |
| NO: 38) | | |
| HUMHPA1B_PEA_1_T16 (SEQ ID | 248 | 257 |
| NO: 39) | | |
| HUMHPA1B_PEA_1_T19 (SEQ ID | 248 | 257 |
| NO: 40) | | |
| HUMHPA1B_PEA_1_T27 (SEQ ID | 248 | 257 |
| NO: 42) | | |
| HUMHPA1B_PEA_1_T55 (SEQ ID | 248 | 257 |
| NO: 44) | | |
| HUMHPA1B_PEA_1_T56 (SEQ ID | 248 | 257 |
| NO: 45) | | |
| HUMHPA1B_PEA_1_T59 (SEQ ID | 248 | 257 |
| NO: 46) | | |

[0605] Segment cluster HUMHPA1B_PEA_{—}1_node_{—}21 (SEQ ID NO:69) according to the present invention is supported by 66 libraries. The number of libraries was determined as previously described. This segment can be found in the following transcript(s): HUMHPA1B_PEA_{—}1_T4 (SEQ ID NO:35), HUMHPA1B_PEA_{—}1_T6 (SEQ ID NO:36), HUMHPA1B_PEA_{—}1_T7 (SEQ ID NO:37), HUMHPA1B_PEA_{—}1_T12 (SEQ ID NO:38), HUMHPA1B_PEA_{—}1_T19 (SEQ ID NO:40), HUMHPA1B_PEA_{—}1_T27 (SEQ ID NO:42) and HUMHPA1B_PEA_{—}1_T59 (SEQ ID NO:46). Table 68 below describes the starting and ending position of this segment on each transcript.

TABLE 68
Segment location on transcripts

| | | Segment |
|---|---|---|
| | Segment | ending |
| Transcript name | starting position | position |
| HUMHPA1B_PEA_1_T4 (SEQ ID | 1018 | 1043 |
| NO: 35) | | |
| HUMHPA1B_PEA_1_T6 (SEQ ID | 258 | 283 |
| NO: 36) | | |
| HUMHPA1B_PEA_1_T7 (SEQ ID | 258 | 283 |
| NO: 37) | | |
| HUMHPA1B_PEA_1_T12 (SEQ ID | 258 | 283 |
| NO: 38) | | |
| HUMHPA1B_PEA_1_T19 (SEQ ID | 258 | 283 |
| NO: 40) | | |
| HUMHPA1B_PEA_1_T27 (SEQ ID | 258 | 283 |
| NO: 42) | | |
| HUMHPA1B_PEA_1_T59 (SEQ ID | 258 | 283 |
| NO: 46) | | |

[0606] Segment cluster HUMHPA1B_PEA_{—}1_node_{—}22 (SEQ ID NO:70) according to the present invention can be found in the following transcript(s): HUMHPA1B_PEA_{—}1_T4 (SEQ ID NO:35), HUMHPA1B_PEA_{—}1_T6 (SEQ ID NO:36), HUMHPA1B_PEA_{—}_T7 (SEQ ID NO:37), HUMHPA1B_PEA_{—}1_T12 (SEQ ID NO:38), HUMHPA1B_PEA_{—}1_T19 (SEQ ID NO:40), HUMHPA1B_PEA_{—}1_T27 (SEQ ID NO:42) and HUMHPA1B_PEA_{—}1_T59 (SEQ ID NO:46). Table 69 below describes the starting and ending position of this segment on each transcript.

TABLE 69
Segment location on transcripts

| | | Segment |
|---|---|---|
| | Segment | ending |
| Transcript name | starting position | position |
| HUMHPA1B_PEA_1_T4 (SEQ ID | 1044 | 1059 |
| NO: 35) | | |
| HUMHPA1B_PEA_1_T6 (SEQ ID | 284 | 299 |
| NO: 36) | | |
| HUMHPA1B_PEA_1_T7 (SEQ ID | 284 | 299 |
| NO: 37) | | |
| HUMHPA1B_PEA_1_T12 (SEQ ID | 284 | 299 |
| NO: 38) | | |
| HUMHPA1B_PEA_1_T19 (SEQ ID | 284 | 299 |
| NO: 40) | | |
| HUMHPA1B_PEA_1_T27 (SEQ ID | 284 | 299 |
| NO: 42) | | |
| HUMHPA1B_PEA_1_T59 (SEQ ID | 284 | 299 |
| NO: 46) | | |

[0607] Segment cluster HUMHPA1B_PEA_{—}1_node_{—}23 (SEQ ID NO:71) according to the present invention can be found in the following transcript(s): HUMHPA1B_PEA_{—}1_T4 (SEQ ID NO:35), HUMHPA1B_PEA_{—}1_T6 (SEQ ID NO:36), HUMHPA1B_PEA_{—}1_T7 (SEQ ID NO:37), HUMHPA1B_PEA_{—}1_T12 (SEQ ID NO:38, HUMHPA1B_PEA_{—}1_T19 (SEQ ID NO:40), HUMHPA1B_PEA_{—}1_T27 (SEQ ID NO:42) and HUMHPA1B_PEA_{—}1_T59 (SEQ ID NO:46). Table 70 below describes the starting and ending position of this segment on each transcript.

TABLE 70
Segment location on transcripts

| | | Segment |
|---|---|---|
| | Segment | ending |
| Transcript name | starting position | position |
| HUMHPA1B_PEA_1_T4 (SEQ ID | 1060 | 1077 |
| NO: 35) | | |
| HUMHPA1B_PEA_1_T6 (SEQ ID | 300 | 317 |
| NO: 36) | | |
| HUMHPA1B_PEA_1_T7 (SEQ ID | 300 | 317 |
| NO: 37) | | |
| HUMHPA1B_PEA_1_T12 (SEQ ID | 300 | 317 |
| NO: 38) | | |
| HUMHPA1B_PEA_1_T19 (SEQ ID | 300 | 317 |
| NO: 40) | | |
| HUMHPA1B_PEA_1_T27 (SEQ ID | 300 | 317 |
| NO: 42) | | |
| HUMHPA1B_PEA_1_T59 (SEQ ID | 300 | 317 |
| NO: 46) | | |

[0608] Segment cluster HUMHPA1B_PEA_{—}1_node_{—}24 (SEQ ID NO:72) according to the present invention can be found in the following transcript(s): HUMHPA1B_PEA_{—}1_T4 (SEQ ID NO:35), HUMHPA1B_PEA_{—}1_T6 (SEQ ID NO:36), HUMHPA1B_PEA_{—}1_T7 (SEQ ID NO:37), HUMHPA1B_PEA_{—}1_T12 (SEQ ID NO:38), HUMHPA1B_PEA_{—}1_T19 (SEQ ID NO:40), HUMHPA1B_PEA_{—}1_T27 (SEQ ID NO:42) and HUMHPA1B_PEA_{—}1_T59 (SEQ ID NO:46). Table 71 below describes the starting and ending position of this segment on each transcript.

TABLE 71
Segment location on transcripts

| | | Segment |
|---|---|---|
| | Segment | ending |
| Transcript name | starting position | position |
| HUMHPA1B_PEA_1_T4 (SEQ ID | 1078 | 1092 |
| NO: 35) | | |
| HUMHPA1B_PEA_1_T6 (SEQ ID | 318 | 332 |
| NO: 36) | | |
| HUMHPA1B_PEA_1_T7 (SEQ ID | 318 | 332 |
| NO: 37) | | |
| HUMHPA1B_PEA_1_T12 (SEQ ID | 318 | 332 |
| NO: 38) | | |
| HUMHPA1B_PEA_1_T19 (SEQ ID | 318 | 332 |
| NO: 40) | | |
| HUMHPA1B_PEA_1_T27 (SEQ ID | 318 | 332 |
| NO: 42) | | |
| HUMHPA1B_PEA_1_T59 (SEQ ID | 318 | 332 |
| NO: 46) | | |

[0609] Segment cluster HUMHPA1B_PEA_{—}1_node_{—}27 (SEQ ID NO:73) according to the present invention is supported by 62 libraries. The number of libraries was determined as previously described. This segment can be found in the following transcript(s): HUMHPA1B_PEA_{—}1_T4 (SEQ ID NO:35), HUMHPA1B_PEA_{—}1_T6 (SEQ ID NO:36), HUMHPA1B_PEA_{—}1_T7 (SEQ ID NO:37) and HUMHPA1B_PEA_{—}1_T19 (SEQ ID NO:40). Table 72 below describes the starting and ending position of this segment on each transcript.

TABLE 72
Segment location on transcripts

| | | Segment |
|---|---|---|
| | Segment | ending |
| Transcript name | starting position | position |
| HUMHPA1B_PEA_1_T4 (SEQ ID | 1093 | 1194 |
| NO: 35) | | |
| HUMHPA1B_PEA_1_T6 (SEQ ID | 333 | 434 |
| NO: 36) | | |
| HUMHPA1B_PEA_1_T7 (SEQ ID | 333 | 434 |
| NO: 37) | | |
| HUMHPA1B_PEA_1_T19 (SEQ ID | 333 | 434 |
| NO: 40) | | |

[0610] Segment cluster HUMHPA1B_PEA_{—}1_node_{—}29 (SEQ ID NO:74) according to the present invention can be found in the following transcript(s): HUMHPA1B_PEA_{—}1_T1 (SEQ ID NO:34), HUMHPA1B_PEA_{—}1_T4 (SEQ ID NO:35), HUMHPA1B_PEA_{—}1_T6 (SEQ ID NO:36), HUMHPA1B_PEA_{—}1_T7 (SEQ ID NO:37), HUMHPA1B_PEA_{—}1_T19 (SEQ ID NO:40), HUMHPA1B_PEA_{—}1_T55 (SEQ ID NO:44) and HUMHPA1B_PEA_{—}1_T56 (SEQ ID NO:45). Table 73 below describes the starting and ending position of this segment on each transcript.

TABLE 73
Segment location on transcripts

| | | Segment |
|---|---|---|
| | Segment | ending |
| Transcript name | starting position | position |
| HUMHPA1B_PEA_1_T1 (SEQ ID | 258 | 277 |
| NO: 34) | | |
| HUMHPA1B_PEA_1_T4 (SEQ ID | 1195 | 1214 |
| NO: 35) | | |
| HUMHPA1B_PEA_1_T6 (SEQ ID | 1193 | 1212 |
| NO: 36) | | |
| HUMHPA1B_PEA_1_T7 (SEQ ID | 435 | 454 |
| NO: 37) | | |
| HUMHPA1B_PEA_1_T19 (SEQ ID | 435 | 454 |
| NO: 40) | | |
| HUMHPA1B_PEA_1_T55 (SEQ ID | 258 | 277 |
| NO: 44) | | |
| HUMHPA1B_PEA_1_T56 (SEQ ID | 258 | 277 |
| NO: 45) | | |

[0611] Segment cluster HUMHPA1B_PEA_{—}1_node_{—}30 (SEQ ID NO:75) according to the present invention can be found in the following transcript(s): HUMHPA1B_PEA_{—}1_T1 (SEQ ID NO:34), HUMHPA1B_PEA_{—}1_T4 (SEQ ID NO:35), HUMHPA1B_PEA_{—}1_T6 (SEQ ID NO:36), HUMHPA1B_PEA_{—}1_T7 (SEQ ID NO:37), HUMHPA1B_PEA_{—}1_T19 (SEQ ID NO:40), HUMHPA1B_PEA_{—}1_T55 (SEQ ID NO:44) and HUMHPA1B_PEA_{—}1_T56 (SEQ ID NO:45). Table 74 below describes the starting and ending position of this segment on each transcript.

TABLE 74
Segment location on transcripts

| | | Segment |
|---|---|---|
| | Segment | ending |
| Transcript name | starting position | position |
| HUMHPA1B_PEA_1_T1 (SEQ ID | 278 | 283 |
| NO: 34) | | |
| HUMHPA1B_PEA_1_T4 (SEQ ID | 1215 | 1220 |
| NO: 35) | | |
| HUMHPA1B_PEA_1_T6 (SEQ ID | 1213 | 1218 |
| NO: 36) | | |
| HUMHPA1B_PEA_1_T7 (SEQ ID | 455 | 460 |
| NO: 37) | | |
| HUMHPA1B_PEA_1_T19 (SEQ ID | 455 | 460 |
| NO: 40) | | |
| HUMHPA1B_PEA_1_T55 (SEQ ID | 278 | 283 |
| NO: 44) | | |
| HUMHPA1B_PEA_1_T56 (SEQ ID | 278 | 283 |
| NO: 45) | | |

[0612] Segment cluster HUMHPA1B_PEA_{—}1_node_{—}31 (SEQ ID NO:76) according to the present invention can be found in the following transcript(s): HUMHPA1B_PEA_{—}1_T1 (SEQ ID NO:34), HUMHPA1B_PEA_{—}1_T4 (SEQ ID NO:35), HUMHPA1B_PEA_{—}1_T6 (SEQ ID NO:36), HUMHPA1B_PEA_{—}1_T7 (SEQ ID NO:37), HUMHPA1B_PEA_{—}1_T19 (SEQ ID NO:40), HUMHPA1B_PEA_{—}1_T55 (SEQ ID NO:44) and HUMHPA1B_PEA_{—}1_T56 (SEQ ID NO:45). Table 75 below describes the starting and ending position of this segment on each transcript.

TABLE 75
Segment location on transcripts

| | | Segment |
|---|---|---|
| | Segment | ending |
| Transcript name | starting position | position |
| HUMHPA1B_PEA_1_T1 (SEQ ID | 284 | 289 |
| NO: 34) | | |
| HUMHPA1B_PEA_1_T4 (SEQ ID | 1221 | 1226 |
| NO: 35) | | |
| HUMHPA1B_PEA_1_T6 (SEQ ID | 1219 | 1224 |
| NO: 36) | | |
| HUMHPA1B_PEA_1_T7 (SEQ ID | 461 | 466 |
| NO: 37) | | |
| HUMHPA1B_PEA_1_T19 (SEQ ID | 461 | 466 |
| NO: 40) | | |
| HUMHPA1B_PEA_1_T55 (SEQ ID | 284 | 289 |
| NO: 44) | | |
| HUMHPA1B_PEA_1_T56 (SEQ ID | 284 | 289 |
| NO: 45) | | |

[0613] Segment cluster HUMHPA1B_PEA_{—}1_node_{—}32 (SEQ ID NO:77) according to the present invention can be found in the following transcript(s): HUMHPA1B_PEA_{—}1_T1 (SEQ ID NO:34), HUMHPA1B_PEA_{—}1_T4 (SEQ ID NO:35), HUMHPA1B_PEA_{—}1_T6 (SEQ ID NO:36), HUMHPA1B_PEA_{—}1_T7 (SEQ ID NO:37, HUMHPA1B_PEA_{—}1_T19 (SEQ ID NO:40), HUMHPA1B_PEA_{—}1_T55 (SEQ ID NO:44) and HUMHPA1B_PEA_{—}1_T56 (SEQ ID NO:45). Table 76 below describes the starting and ending position of this segment on each transcript.

TABLE 76
Segment location on transcripts

| | | Segment |
|---|---|---|
| | Segment | ending |
| Transcript name | starting position | position |
| HUMHPA1B_PEA_1_T1 (SEQ ID | 290 | 299 |
| NO: 34) | | |
| HUMHPA1B_PEA_1_T4 (SEQ ID | 1227 | 1236 |
| NO: 35) | | |
| HUMHPA1B_PEA_1_T6 (SEQ ID | 1225 | 1234 |
| NO: 36) | | |
| HUMHPA1B_PEA_1_T7 (SEQ ID | 467 | 476 |
| NO: 37) | | |
| HUMHPA1B_PEA_1_T19 (SEQ ID | 467 | 476 |
| NO: 40) | | |
| HUMHPA1B_PEA_1_T55 (SEQ ID | 290 | 299 |
| NO: 44) | | |
| HUMHPA1B_PEA_1_T56 (SEQ ID | 290 | 299 |
| NO: 45) | | |

[0614] Segment cluster HUMHPA1B_PEA_{—}1_node_{—}33 (SEQ ID NO:78) according to the present invention is supported by 88 libraries. The number of libraries was determined as previously described. This segment can be found in the following transcript(s): HUMHPA1B_PEA_{—}1_T1 (SEQ ID NO:34), HUMHPA1B_PEA_{—}1_T4 (SEQ ID NO:35), HUMHPA1B_PEA_{—}1_T6 (SEQ ID NO:36), HUMHPA1B PEA_{—}1_T7 (SEQ ID NO:37), HUMHPA1B_PEA_{—}1_T19 (SEQ ID NO:40), HUMHPA1B_PEA_{—}1_T55 (SEQ ID NO:44) and HUMHPA1B_PEA_{—}1_T56 (SEQ ID NO:45). Table 77 below describes the starting and ending position of this segment on each transcript.

TABLE 77
Segment location on transcripts

| | | Segment |
|---|---|---|
| | Segment | ending |
| Transcript name | starting position | position |
| HUMHPA1B_PEA_1_T1 (SEQ ID | 300 | 332 |
| NO: 34) | | |
| HUMHPA1B_PEA_1_T4 (SEQ ID | 1237 | 1269 |
| NO: 35) | | |
| HUMHPA1B_PEA_1_T6 (SEQ ID | 1235 | 1267 |
| NO: 36) | | |
| HUMHPA1B_PEA_1_T7 (SEQ ID | 477 | 509 |
| NO: 37) | | |
| HUMHPA1B_PEA_1_T19 (SEQ ID | 477 | 509 |
| NO: 40) | | |
| HUMHPA1B_PEA_1_T55 (SEQ ID | 300 | 332 |
| NO: 44) | | |
| HUMHPA1B_PEA_1_T56 (SEQ ID | 300 | 332 |
| NO: 45) | | |

[0615] Segment cluster HUMHPA1B_PEA_{—}1_node_{—}34 (SEQ ID NO:79) according to the present invention can be found in the following transcript(s): HUMHPA1B_PEA_{—}1_T7 (SEQ ID NO:37). Table 78 below describes the starting and ending position of this segment on each transcript.

TABLE 78
Segment location on transcripts

| | Segment | Segment |
|---|---|---|
| Transcript name | starting position | ending position |
| HUMHPA1B_PEA_1_T7 (SEQ ID | 510 | 523 |
| NO: 37) | | |

[0616] Segment cluster HUMHPA1B_PEA_{—}1_node_{—}36 (SEQ ID NO:80) according to the present invention can be found in the following transcript(s): HUMHPA1B_PEA_{—}1_T1 (SEQ ID NO:34), HUMHPA1B_PEA_{—}1_T4 (SEQ ID NO:35), HUMHPA1B_PEA_{—}1_T6 (SEQ ID NO:36), HUMHPA1B_PEA_{—}1_T7 (SEQ ID NO:37, HUMHPA1B_PEA_{—}1_T12 (SEQ ID NO:38) and HUMHPA1B_PEA_{—}1_T56 (SEQ ID NO:45). Table 79 below describes the starting and ending position of this segment on each transcript.

TABLE 79
Segment location on transcripts

| | Segment | |
|---|---|---|
| | starting | Segment |
| Transcript name | position | ending position |
| HUMHPA1B_PEA_1_T1 (SEQ ID | 333 | 343 |
| NO: 34) | | |
| HUMHPA1B_PEA_1_T4 (SEQ ID | 1270 | 1280 |
| NO: 35) | | |
| HUMHPA1B_PEA_1_T6 (SEQ ID | 1268 | 1278 |
| NO: 36) | | |
| HUMHPA1B_PEA_1_T7 (SEQ ID | 1433 | 1443 |
| NO: 37) | | |
| HUMHPA1B_PEA_1_T12 (SEQ ID | 333 | 343 |
| NO: 38) | | |
| HUMHPA1B_PEA_1_T56 (SEQ ID | 333 | 343 |
| NO: 45) | | |

[0617] Segment cluster HUMHPA1B_PEA_{—}1_node_{—}37 (SEQ ID NO:81) according to the present invention can be found in the following transcript(s): HUMHPA1B_PEA_{—}1_T1 (SEQ ID NO:34), HUMHPA1B_PEA_{—}1_T4 (SEQ ID NO:35), HUMHPA1B_PEA_{—}1_T6 (SEQ ID NO:36), HUMHPA1B_PEA_{—}1_T7 (SEQ ID NO:37), HUMHPA1B_PEA_{—}1_T12 (SEQ ID NO:38) and HUMHPA1B_PEA_{—}1_T56 (SEQ ID NO:45). Table 80 below describes the starting and ending position of this segment on each transcript.

TABLE 80
Segment location on transcripts

| | Segment | |
|---|---|---|
| | starting | Segment |
| Transcript name | position | ending position |
| HUMHPA1B_PEA_1_T1 (SEQ ID | 344 | 349 |
| NO: 34) | | |
| HUMHPA1B_PEA_1_T4 (SEQ ID | 1281 | 1286 |
| NO: 35) | | |
| HUMHPA1B_PEA_1_T6 (SEQ ID | 1279 | 1284 |
| NO: 36) | | |
| HUMHPA1B_PEA_1_T7 (SEQ ID | 1444 | 1449 |
| NO: 37) | | |
| HUMHPA1B_PEA_1_T12 (SEQ ID | 344 | 349 |
| NO: 38) | | |
| HUMHPA1B_PEA_1_T56 (SEQ ID | 344 | 349 |
| NO: 45) | | |

[0618] Segment cluster HUMHPA1B_PEA_{—}1_node_{—}38 (SEQ ID NO:82) according to the present invention can be found in the following transcript(s): HUMHPA1B_PEA_{—}1_T1 (SEQ ID NO:34), HUMHPA1B_PEA_{—}1_T4 (SEQ ID NO:35), HUMHPA1B_PEA_{—}1_T6 (SEQ ID NO:36), HUMHPA1B_PEA_{—}1_T7 (SEQ ID NO:37), HUMHPA1B_PEA_{—}1_T12 (SEQ ID NO:38), HUMHPA1B_PEA_{—}1_T16 (SEQ ID NO:39) and HUMHPA1B_PEA_{—}1_T56 (SEQ ID NO:45). Table 81 below describes the starting and ending position of this segment on each transcript.

TABLE 81
Segment location on transcripts

| | Segment | |
|---|---|---|
| | starting | Segment |
| Transcript name | position | ending position |
| HUMHPA1B_PEA_1_T1 (SEQ ID | 350 | 361 |
| NO: 34) | | |
| HUMHPA1B_PEA_1_T4 (SEQ ID | 1287 | 1298 |
| NO: 35) | | |
| HUMHPA1B_PEA_1_T6 (SEQ ID | 1285 | 1296 |
| NO: 36) | | |
| HUMHPA1B_PEA_1_T7 (SEQ ID | 1450 | 1461 |
| NO: 37) | | |
| HUMHPA1B_PEA_1_T12 (SEQ ID | 350 | 361 |
| NO: 38) | | |
| HUMHPA1B_PEA_1_T16 (SEQ ID | 258 | 269 |
| NO: 39) | | |
| HUMHPA1B_PEA_1_T56 (SEQ ID | 350 | 361 |
| NO: 45) | | |

[0619] Segment cluster HUMHPA1B_PEA_{—}1_node_{—}39 (SEQ ID NO:83) according to the present invention can be found in the following transcript(s): HUMHPA1B_PEA_{—}1_T1 (SEQ ID NO:34), HUMHPA1B_PEA_{—}1_T4 (SEQ ID NO:35), HUMHPA1B_PEA_{—}1_T6 (SEQ ID NO:36), HUMHPA1B_PEA_{—}1_T7 (SEQ ID NO:37, HUMHPA1B_PEA_{—}1_T12 (SEQ ID NO:38), HUMHPA1B_PEA_{—}1_T16 (SEQ ID NO:39) and HUMHPA1B_PEA_{—}1_T56 (SEQ ID NO:45). Table 82 below describes the starting and ending position of this segment on each transcript.

TABLE 82
Segment location on transcripts

| | Segment | |
|---|---|---|
| | starting | Segment |
| Transcript name | position | ending position |
| HUMHPA1B_PEA_1_T1 (SEQ ID | 362 | 365 |
| NO: 34) | | |
| HUMHPA1B_PEA_1_T4 (SEQ ID | 1299 | 1302 |
| NO: 35) | | |
| HUMHPA1B_PEA_1_T6 (SEQ ID | 1297 | 1300 |
| NO: 36) | | |
| HUMHPA1B_PEA_1_T7 (SEQ ID | 1462 | 1465 |
| NO: 37) | | |
| HUMHPA1B_PEA_1_T12 (SEQ ID | 362 | 365 |
| NO: 38) | | |
| HUMHPA1B_PEA_1_T16 (SEQ ID | 270 | 273 |
| NO: 39) | | |
| HUMHPA1B_PEA_1_T56 (SEQ ID | 362 | 365 |
| NO: 45) | | |

[0620] Segment cluster HUMHPA1B_PEA_{—}1_node_{—}40 (SEQ ID NO:84) according to the present invention can be found in the following transcript(s): HUMHPA1B_PEA_{—}1_T1 (SEQ ID NO:34), HUMHPA1B_PEA_{—}1_T4 (SEQ ID NO:35), HUMHPA1B_PEA_{—}1_T6 (SEQ ID NO:36), HUMHPA1B_PEA_{—}1_T7 (SEQ ID NO:37), HUMHPA1B_PEA_{—}1_T12 (SEQ ID NO:38), HUMHPA1B_PEA_{—}1_T16 (SEQ ID NO:39), HUMHPA1B_PEA_{—}1_T20 (SEQ ID NO:41) and HUMHPA1B_PEA_{—}1_T56 (SEQ ID NO:45). Table 83 below describes the starting and ending position of this segment on each transcript.

TABLE 83
Segment location on transcripts

| | Segment | |
|---|---|---|
| | starting | Segment |
| Transcript name | position | ending position |
| HUMHPA1B_PEA_1_T1 (SEQ ID | 366 | 370 |
| NO: 34) | | |
| HUMHPA1B_PEA_1_T4 (SEQ ID | 1303 | 1307 |
| NO: 35) | | |
| HUMHPA1B_PEA_1_T6 (SEQ ID | 1301 | 1305 |
| NO: 36) | | |
| HUMHPA1B_PEA_1_T7 (SEQ ID | 1466 | 1470 |
| NO: 37) | | |
| HUMHPA1B_PEA_1_T12 (SEQ ID | 366 | 370 |
| NO: 38) | | |
| HUMHPA1B_PEA_1_T16 (SEQ ID | 274 | 278 |
| NO: 39) | | |
| HUMHPA1B_PEA_1_T20 (SEQ ID | 222 | 226 |
| NO: 41) | | |
| HUMHPA1B_PEA_1_T56 (SEQ ID | 366 | 370 |
| NO: 45) | | |

[0621] Segment cluster HUMHPA1B_PEA_{—}1_node_{—}41 (SEQ ID NO:85) according to the present invention can be found in the following transcript(s): HUMHPA1B_PEA_{—}1_T1 (SEQ ID NO:34), HUMHPA1B_PEA_{—}1_T4 (SEQ ID NO:35, HUMHPA1B_PEA_{—}1_T6 (SEQ ID NO:36), HUMHPA1B_PEA_{—}1_T7 (SEQ ID NO:37), HUMHPA1B_PEA_{—}1_T12 (SEQ ID NO:38), HUMHPA1B_PEA_{—}1_T16 (SEQ ID NO:39), HUMHPA1B_PEA_{—}1_T20 (SEQ ID NO:41) and HUMHPA1B_PEA_{—}1_T56 (SEQ ID NO:45). Table 84 below describes the starting and ending position of this segment on each transcript.

TABLE 84
Segment location on transcripts

| | Segment | |
|---|---|---|
| | starting | Segment |
| Transcript name | position | ending position |
| HUMHPA1B_PEA_1_T1 (SEQ ID | 371 | 376 |
| NO: 34) | | |
| HUMHPA1B_PEA_1_T4 (SEQ ID | 1308 | 1313 |
| NO: 35) | | |
| HUMHPA1B_PEA_1_T6 (SEQ ID | 1306 | 1311 |
| NO: 36) | | |
| HUMHPA1B_PEA_1_T7 (SEQ ID | 1471 | 1476 |
| NO: 37) | | |
| HUMHPA1B_PEA_1_T12 (SEQ ID | 371 | 376 |
| NO: 38) | | |
| HUMHPA1B_PEA_1_T16 (SEQ ID | 279 | 284 |
| NO: 39) | | |
| HUMHPA1B_PEA_1_T20 (SEQ ID | 227 | 232 |
| NO: 41) | | |
| HUMHPA1B_PEA_1_T56 (SEQ ID | 371 | 376 |
| NO: 45) | | |

[0622] Segment cluster HUMHPA1B_PEA_{—}1_node_{—}42 (SEQ ID NO:86) according to the present invention can be found in the following transcript(s): HUMHPA1B_PEA_{—}1_T1 (SEQ ID NO:34), HUMHPA1B_PEA_{—}1_T4 (SEQ ID NO:35), HUMHPA1B_PEA_{—}1_T6 (SEQ ID NO:36), HUMHPA1B_PEA_{—}1_T7 (SEQ ID NO:37), HUMHPA1B_PEA_{—}1_T12 (SEQ ID NO:38), HUMHPA1B_PEA_{—}1_T16 (SEQ ID NO:39, HUMHPA1B_PEA_{—}1_T20 (SEQ ID NO:41) and HUMHPA1B_PEA_{—}1_T56 (SEQ ID NO:45). Table 85 below describes the starting and ending position of this segment on each transcript.

TABLE 85
Segment location on transcripts

| | Segment | |
|---|---|---|
| | starting | Segment |
| Transcript name | position | ending position |
| HUMHPA1B_PEA_1_T1 (SEQ ID | 377 | 388 |
| NO: 34) | | |
| HUMHPA1B_PEA_1_T4 (SEQ ID | 1314 | 1325 |
| NO: 35) | | |
| HUMHPA1B_PEA_1_T6 (SEQ ID | 1312 | 1323 |
| NO: 36) | | |
| HUMHPA1B_PEA_1_T7 (SEQ ID | 1477 | 1488 |
| NO: 37) | | |
| HUMHPA1B_PEA_1_T12 (SEQ ID | 377 | 388 |
| NO: 38) | | |
| HUMHPA1B_PEA_1_T16 (SEQ ID | 285 | 296 |
| NO: 39) | | |
| HUMHPA1B_PEA_1_T20 (SEQ ID | 233 | 244 |
| NO: 41) | | |
| HUMHPA1B_PEA_1_T56 (SEQ ID | 377 | 388 |
| NO: 45) | | |

[0623] Segment cluster HUMHPA1B_PEA_{—}1_node_{—}43 (SEQ ID NO:87) according to the present invention can be found in the following transcript(s): HUMHPA1B_PEA_{—}1_T1 (SEQ ID NO:34), HUMHPA1B_PEA_{—}1_T4 (SEQ ID NO:35), HUMHPA1B_PEA_{—}1_T6 (SEQ ID NO:36), HUMHPA1B_PEA_{—}1_T7 (SEQ ID NO:37), HUMHPA1B_PEA_{—}1_T12 (SEQ ID NO:38), HUMHPA1B_PEA_{—}1_T16 (SEQ ID NO:39, HUMHPA1B_PEA_{—}1_T20 (SEQ ID NO:41) and HUMHPA1B_PEA_{—}1_T56 (SEQ ID NO:45. Table 86 below describes the starting and ending position of this segment on each transcript.

TABLE 86
Segment location on transcripts

| | Segment | |
|---|---|---|
| | starting | Segment |
| Transcript name | position | ending position |
| HUMHPA1B_PEA_1_T1 (SEQ ID | 389 | 411 |
| NO: 34) | | |
| HUMHPA1B_PEA_1_T4 (SEQ ID | 1326 | 1348 |
| NO: 35) | | |
| HUMHPA1B_PEA_1_T6 (SEQ ID | 1324 | 1346 |
| NO: 36) | | |
| HUMHPA1B_PEA_1_T7 (SEQ ID | 1489 | 1511 |
| NO: 37) | | |
| HUMHPA1B_PEA_1_T12 (SEQ ID | 389 | 411 |
| NO: 38) | | |
| HUMHPA1B_PEA_1_T16 (SEQ ID | 297 | 319 |
| NO: 39) | | |
| HUMHPA1B_PEA_1_T20 (SEQ ID | 245 | 267 |
| NO: 41) | | |
| HUMHPA1B_PEA_1_T56 (SEQ ID | 389 | 411 |
| NO: 45) | | |

[0624] Segment cluster HUMHPA1B_PEA_{—}1_node_{—}44 (SEQ ID NO:88) according to the present invention can be found in the following transcript(s): HUMHPA1B_PEA_{—}1_T1 (SEQ ID NO:34), HUMHPA1B_PEA_{—}1_T4 (SEQ ID NO:35), HUMHPA1B_PEA_{—}1_T6 (SEQ ID NO:36), HUMHPA1B_PEA_{—}1_T7 (SEQ ID NO:37), HUMHPA1B_PEA_{—}1_T12 (SEQ ID NO:38), HUMHPA1B_PEA_{—}1_T16 (SEQ ID NO:39), HUMHPA1B_PEA_{—}1_T20 (SEQ ID NO:41) and HUMHPA1B_PEA_{—}1_T56 (SEQ ID NO:45). Table 87 below describes the starting and ending position of this segment on each transcript.

TABLE 87
Segment location on transcripts

| | Segment | |
|---|---|---|
| | starting | Segment |
| Transcript name | position | ending position |
| HUMHPA1B_PEA_1_T1 (SEQ ID | 412 | 424 |
| NO: 34) | | |
| HUMHPA1B_PEA_1_T4 (SEQ ID | 1349 | 1361 |
| NO: 35) | | |
| HUMHPA1B_PEA_1_T6 (SEQ ID | 1347 | 1359 |
| NO: 36) | | |
| HUMHPA1B_PEA_1_T7 (SEQ ID | 1512 | 1524 |
| NO: 37) | | |
| HUMHPA1B_PEA_1_T12 (SEQ ID | 412 | 424 |
| NO: 38) | | |
| HUMHPA1B_PEA_1_T16 (SEQ ID | 320 | 332 |
| NO: 39) | | |
| HUMHPA1B_PEA_1_T20 (SEQ ID | 268 | 280 |
| NO: 41) | | |
| HUMHPA1B_PEA_1_T56 (SEQ ID | 412 | 424 |
| NO: 45) | | |

[0625] Segment cluster HUMHPA1B_PEA_{—}1_node_{—}45 (SEQ ID NO:89) according to the present invention can be found in the following transcript(s): HUMHPA1B_PEA_{—}1_T1 (SEQ ID NO:34), HUMHPA1B_PEA_{—}1_T4 (SEQ ID NO:35), HUMHPA1B_PEA_{—}1_T6 (SEQ ID NO:36), HUMHPA1B_PEA_{—}1_T7 (SEQ ID NO:37), HUMHPA1B_PEA_{—}1_T12 (SEQ ID NO:38), HUMHPA1B_PEA_{—}1_T16 (SEQ ID NO:39, HUMHPA1B_PEA_{—}1_T20 (SEQ ID NO:41), HUMHPA1B_PEA_{—}1_T29 (SEQ ID NO:43) and HUMHPA1B_PEA_{—}1_T56 (SEQ ID NO:45). Table 88 below describes the starting and ending position of this segment on each transcript.

TABLE 88
Segment location on transcripts

| | | Segment |
|---|---|---|
| | Segment | ending |
| Transcript name | starting position | position |
| HUMHPA1B_PEA_1_T1 (SEQ ID | 425 | 436 |
| NO: 34) | | |
| HUMHPA1B_PEA_1_T4 (SEQ ID | 1362 | 1373 |
| NO: 35) | | |
| HUMHPA1B_PEA_1_T6 (SEQ ID | 1360 | 1371 |
| NO: 36) | | |
| HUMHPA1B_PEA_1_T7 (SEQ ID | 1525 | 1536 |
| NO: 37) | | |
| HUMHPA1B_PEA_1_T12 (SEQ ID | 425 | 436 |
| NO: 38) | | |
| HUMHPA1B_PEA_1_T16 (SEQ ID | 333 | 344 |
| NO: 39) | | |
| HUMHPA1B_PEA_1_T20 (SEQ ID | 281 | 292 |
| NO: 41) | | |
| HUMHPA1B_PEA_1_T29 (SEQ ID | 156 | 167 |
| NO: 43) | | |
| HUMHPA1B_PEA_1_T56 (SEQ ID | 425 | 436 |
| NO: 45) | | |

[0626] Segment cluster HUMHPA1B_PEA_{—}1_node_{—}46 (SEQ ID NO:90) according to the present invention can be found in the following transcript(s): HUMHPA1B_PEA_{—}1_T1 (SEQ ID NO:34), HUMHPA1B_PEA_{—}1_T4 (SEQ ID NO:35), HUMHPA1B_PEA_{—}1_T6 (SEQ ID NO:36), HUMHPA1B_PEA_{—}1_T7 (SEQ ID NO:37), HUMHPA1B_PEA_{—}1_T12 (SEQ ID NO:38), HUMHPA1B_PEA_{—}1_T16 (SEQ ID NO:39), HUMHPA1B_PEA_{—}1_T20 (SEQ ID NO:41), HUMHPA1B_PEA_{—}1_T29 (SEQ ID NO:43) and HUMHPA1B_PEA_{—}1_T56 (SEQ ID NO:45). Table 89 below describes the starting and ending position of this segment on each transcript.

TABLE 89
Segment location on transcripts

| | | Segment |
|---|---|---|
| | Segment | ending |
| Transcript name | starting position | position |
| HUMHPA1B_PEA_1_T1 (SEQ ID | 437 | 447 |
| NO: 34) | | |
| HUMHPA1B_PEA_1_T4 (SEQ ID | 1374 | 1384 |
| NO: 35) | | |
| HUMHPA1B_PEA_1_T6 (SEQ ID | 1372 | 1382 |
| NO: 36) | | |
| HUMHPA1B_PEA_1_T7 (SEQ ID | 1537 | 1547 |
| NO: 37) | | |
| HUMHPA1B_PEA_1_T12 (SEQ ID | 437 | 447 |
| NO: 38) | | |
| HUMHPA1B_PEA_1_T16 (SEQ ID | 345 | 355 |
| NO: 39) | | |
| HUMHPA1B_PEA_1_T20 (SEQ ID | 293 | 303 |
| NO: 41) | | |
| HUMHPA1B_PEA_1_T29 (SEQ ID | 168 | 178 |
| NO: 43) | | |
| HUMHPA1B_PEA_1_T56 (SEQ ID | 437 | 447 |
| NO: 45) | | |

[0627] Segment cluster HUMHPA1B_PEA_{—}1_node_{—}47 (SEQ ID NO:91) according to the present invention can be found in the following transcript(s): HUMHPA1B_PEA_{—}1_T1 (SEQ ID NO:34), HUMHPA1B_PEA_{—}1_T4 (SEQ ID NO:35), HUMHPA1B_PEA_{—}1_T6 (SEQ ID NO:36), HUMHPA1B_PEA_{—}1_T7 (SEQ ID NO:37), HUMHPA1B_PEA_{—}1_T12 (SEQ ID NO:38), HUMHPA1B_PEA_{—}1_T16 (SEQ ID NO:39), HUMHPA1B_PEA_{—}1_T20 (SEQ ID NO:41), HUMHPA1B_PEA_{—}1_T29 (SEQ ID NO:43) and HUMHPA1B_PEA_{—}1_T56 (SEQ ID NO:45). Table 90 below describes the starting and ending position of this segment on each transcript.

TABLE 90
Segment location on transcripts

| | | Segment |
|---|---|---|
| | Segment | ending |
| Transcript name | starting position | position |
| HUMHPA1B_PEA_1_T1 (SEQ ID | 448 | 452 |
| NO: 34) | | |
| HUMHPA1B_PEA_1_T4 (SEQ ID | 1385 | 1389 |
| NO: 35) | | |
| HUMHPA1B_PEA_1_T6 (SEQ ID | 1383 | 1387 |
| NO: 36) | | |
| HUMHPA1B_PEA_1_T7 (SEQ ID | 1548 | 1552 |
| NO: 37) | | |
| HUMHPA1B_PEA_1_T12 (SEQ ID | 448 | 452 |
| NO: 38) | | |
| HUMHPA1B_PEA_1_T16 (SEQ ID | 356 | 360 |
| NO: 39) | | |
| HUMHPA1B_PEA_1_T20 (SEQ ID | 304 | 308 |
| NO: 41) | | |
| HUMHPA1B_PEA_1_T29 (SEQ ID | 179 | 183 |
| NO: 43) | | |
| HUMHPA1B_PEA_1_T56 (SEQ ID | 448 | 452 |
| NO: 45) | | |

[0628] Segment cluster HUMHPA1B_PEA_{—}1_node_{—}48 (SEQ ID NO:92) according to the present invention can be found in the following transcript(s): HUMHPA1B_PEA_{—}1_T1 (SEQ ID NO:34), HUMHPA1B_PEA_{—}1_T4 (SEQ ID NO:35), HUMHPA1B_PEA_{—}1_T6 (SEQ ID NO:36), HUMHPA1B_PEA_{—}1_T7 (SEQ ID NO:37), HUMHPA1B_PEA_{—}1_T12 (SEQ ID NO:38), HUMHPA1B_PEA_{—}1_T16 (SEQ ID NO:39), HUMHPA1B_PEA_{—}1_T19 (SEQ ID NO:40), HUMHPA1B_PEA_{—}1_T20 (SEQ ID NO:41), HUMHPA1B_PEA_{—}1_T27 (SEQ ID NO:42) and HUMHPA1B_PEA_{—}1_T29 (SEQ ID NO:43). Table 91 below describes the starting and ending position of this segment on each transcript.

TABLE 91
Segment location on transcripts

| | | Segment |
|---|---|---|
| | Segment | ending |
| Transcript name | starting position | position |
| HUMHPA1B_PEA_1_T1 (SEQ ID | 453 | 473 |
| NO: 34) | | |
| HUMHPA1B_PEA_1_T4 (SEQ ID | 1390 | 1410 |
| NO: 35) | | |
| HUMHPA1B_PEA_1_T6 (SEQ ID | 1388 | 1408 |
| NO: 36) | | |
| HUMHPA1B_PEA_1_T7 (SEQ ID | 1553 | 1573 |
| NO: 37) | | |
| HUMHPA1B_PEA_1_T12 (SEQ ID | 453 | 473 |
| NO: 38) | | |
| HUMHPA1B_PEA_1_T16 (SEQ ID | 361 | 381 |
| NO: 39) | | |
| HUMHPA1B_PEA_1_T19 (SEQ ID | 510 | 530 |
| NO: 40) | | |
| HUMHPA1B_PEA_1_T20 (SEQ ID | 309 | 329 |
| NO: 41) | | |
| HUMHPA1B_PEA_1_T27 (SEQ ID | 333 | 353 |
| NO: 42) | | |
| HUMHPA1B_PEA_1_T29 (SEQ ID | 184 | 204 |
| NO: 43) | | |

[0629] Segment cluster HUMHPA1B_PEA_{—}1_node_{—}49 (SEQ ID NO:93) according to the present invention is supported by 105 libraries. The number of libraries was determined as previously described. This segment can be found in the following transcript(s): HUMHPA1B_PEA_{—}1_T1 (SEQ ID NO:34), HUMHPA1B_PEA_{—}1_T4 (SEQ ID NO:35), HUMHPA1B_PEA_{—}1_T6 (SEQ ID NO:36), HUMHPA1B_PEA_{—}1_T7 (SEQ ID NO:37), HUMHPA1B_PEA_{—}1_T12 (SEQ ID NO:38, HUMHPA1B_PEA_{—}1_T16 (SEQ ID NO:39, HUMHPA1B_PEA_{—}1_T19 (SEQ ID NO:40), HUMHPA1B_PEA_{—}1_T20 (SEQ ID NO:41), HUMHPA1B_PEA_{—}1_T27 (SEQ ID NO:42) and HUMHPA1B_PEA_{—}1_T29 (SEQ ID NO:43). Table 92 below describes the starting and ending position of this segment on each transcript.

TABLE 92
Segment location on transcripts

| | | Segment |
|---|---|---|
| | Segment | ending |
| Transcript name | starting position | position |
| HUMHPA1B_PEA_1_T1 (SEQ ID | 474 | 511 |
| NO: 34) | | |
| HUMHPA1B_PEA_1_T4 (SEQ ID | 1411 | 1448 |
| NO: 35) | | |
| HUMHPA1B_PEA_1_T6 (SEQ ID | 1409 | 1446 |
| NO: 36) | | |
| HUMHPA1B_PEA_1_T7 (SEQ ID | 1574 | 1611 |
| NO: 37) | | |
| HUMHPA1B_PEA_1_T12 (SEQ ID | 474 | 511 |
| NO: 38) | | |
| HUMHPA1B_PEA_1_T16 (SEQ ID | 382 | 419 |
| NO: 39) | | |
| HUMHPA1B_PEA_1_T19 (SEQ ID | 531 | 568 |
| NO: 40) | | |
| HUMHPA1B_PEA_1_T20 (SEQ ID | 330 | 367 |
| NO: 41) | | |
| HUMHPA1B_PEA_1_T27 (SEQ ID | 354 | 391 |
| NO: 42) | | |
| HUMHPA1B_PEA_1_T29 (SEQ ID | 205 | 242 |
| NO: 43) | | |

[0630] Segment cluster HUMHPA1B_PEA_{—}1_node_{—}50 (SEQ ID NO:94) according to the present invention can be found in the following transcript(s): HUMHPA1B_PEA_{—}1_T1 (SEQ ID NO:34), HUMHPA1B_PEA_{—}1_T4 (SEQ ID NO:35), HUMHPA1B_PEA_{—}1_T6 (SEQ ID NO:36), HUMHPA1B_PEA_{—}1_T7 (SEQ ID NO:37), HUMHPA1B_PEA_{—}1_T12 (SEQ ID NO:38), HUMHPA1B_PEA_{—}1_T16 (SEQ ID NO:39), HUMHPA1B_PEA_{—}1_T19 (SEQ ID NO:40), HUMHPA1B_PEA_{—}1_T20 (SEQ ID NO:41), HUMHPA1B_PEA_{—}1_T27 (SEQ ID NO:42) and HUMHPA1B_PEA_{—}1_T29 (SEQ ID NO:43). Table 93 below describes the starting and ending position of this segment on each transcript.

TABLE 93
Segment location on transcripts

| | | Segment |
|---|---|---|
| | Segment | ending |
| Transcript name | starting position | position |
| HUMHPA1B_PEA_1_T1 (SEQ ID | 512 | 530 |
| NO: 34) | | |
| HUMHPA1B_PEA_1_T4 (SEQ ID | 1449 | 1467 |
| NO: 35) | | |
| HUMHPA1B_PEA_1_T6 (SEQ ID | 1447 | 1465 |
| NO: 36) | | |
| HUMHPA1B_PEA_1_T7 (SEQ ID | 1612 | 1630 |
| NO: 37) | | |
| HUMHPA1B_PEA_1_T12 (SEQ ID | 512 | 530 |
| NO: 38) | | |
| HUMHPA1B_PEA_1_T16 (SEQ ID | 420 | 438 |
| NO: 39) | | |
| HUMHPA1B_PEA_1_T19 (SEQ ID | 569 | 587 |
| NO: 40) | | |
| HUMHPA1B_PEA_1_T20 (SEQ ID | 368 | 386 |
| NO: 41) | | |
| HUMHPA1B_PEA_1_T27 (SEQ ID | 392 | 410 |
| NO: 42) | | |
| HUMHPA1B_PEA_1_T29 (SEQ ID | 243 | 261 |
| NO: 43) | | |

[0631] Segment cluster HUMHPA1B_PEA_{—}1_node_{—}51 (SEQ ID NO:95) according to the present invention can be found in the following transcript(s): HUMHPA1B_PEA_{—}1_T1 (SEQ ID NO:34), HUMHPA1B_PEA_{—}1_T4 (SEQ ID NO:35), HUMHPA1B_PEA_{—}1_T6 (SEQ ID NO:36), HUMHPA1B_PEA_{—}1_T7 (SEQ ID NO:37), HUMHPA1B_PEA_{—}1_T12 (SEQ ID NO:38), HUMHPA1B_PEA_{—}1_T16 (SEQ ID NO:39), HUMHPA1B_PEA_{—}1_T19 (SEQ ID NO:40), HUMHPA1B_PEA_{—}1_T20 (SEQ ID NO:41), HUMHPA1B_PEA_{—}1_T27 (SEQ ID NO:42) and HUMHPA1B_PEA_{—}1_T29 (SEQ ID NO:43). Table 94 below describes the starting and ending position of this segment on each transcript.

TABLE 94
Segment location on transcripts

| | | Segment |
|---|---|---|
| | Segment | ending |
| Transcript name | starting position | position |
| HUMHPA1B_PEA_1_T1 (SEQ ID | 531 | 549 |
| NO: 34) | | |
| HUMHPA1B_PEA_1_T4 (SEQ ID | 1468 | 1486 |
| NO: 35) | | |
| HUMHPA1B_PEA_1_T6 (SEQ ID | 1466 | 1484 |
| NO: 36) | | |
| HUMHPA1B_PEA_1_T7 (SEQ ID | 1631 | 1649 |
| NO: 37) | | |
| HUMHPA1B_PEA_1_T12 (SEQ ID | 531 | 549 |
| NO: 38) | | |
| HUMHPA1B_PEA_1_T16 (SEQ ID | 439 | 457 |
| NO: 39) | | |
| HUMHPA1B_PEA_1_T19 (SEQ ID | 588 | 606 |
| NO: 40) | | |
| HUMHPA1B_PEA_1_T20 (SEQ ID | 387 | 405 |
| NO: 41) | | |
| HUMHPA1B_PEA_1_T27 (SEQ ID | 411 | 429 |
| NO: 42) | | |
| HUMHPA1B_PEA_1_T29 (SEQ ID | 262 | 280 |
| NO: 43) | | |

[0632] Segment cluster HUMHPA1B_PEA_{—}1_node_{—}52 (SEQ ID NO:96) according to the present invention can be found in the following transcript(s): HUMHPA1B_PEA_{—}1_T1 (SEQ ID NO:34), HUMHPA1B_PEA_{—}1_T4 (SEQ ID NO:35), HUMHPA1B_PEA_{—}1_T6 (SEQ ID NO:36), HUMHPA1B_PEA_{—}1_T7 (SEQ ID NO:37), HUMHPA1B_PEA_{—}1_T12 (SEQ ID NO:38), HUMHPA1B_PEA_{—}1_T16 (SEQ ID NO:39, HUMHPA1B_PEA_{—}1_T19 (SEQ ID NO:40), HUMHPA1B_PEA_{—}1_T20 (SEQ ID NO:41), HUMHPA1B_PEA_{—}1_T27 (SEQ ID NO:42) and HUMHPA1B_PEA_{—}1_T29 (SEQ ID NO:43). Table 95 below describes the starting and ending position of this segment on each transcript.

TABLE 95
Segment location on transcripts

| | | Segment |
|---|---|---|
| | Segment | ending |
| Transcript name | starting position | position |
| HUMHPA1B_PEA_1_T1 (SEQ ID | 550 | 558 |
| NO: 34) | | |
| HUMHPA1B_PEA_1_T4 (SEQ ID | 1487 | 1495 |
| NO: 35) | | |
| HUMHPA1B_PEA_1_T6 (SEQ ID | 1485 | 1493 |
| NO: 36) | | |
| HUMHPA1B_PEA_1_T7 (SEQ ID | 1650 | 1658 |
| NO: 37) | | |
| HUMHPA1B_PEA_1_T12 (SEQ ID | 550 | 558 |
| NO: 38) | | |
| HUMHPA1B_PEA_1_T16 (SEQ ID | 458 | 466 |
| NO: 39) | | |
| HUMHPA1B_PEA_1_T19 (SEQ ID | 607 | 615 |
| NO: 40) | | |
| HUMHPA1B_PEA_1_T20 (SEQ ID | 406 | 414 |
| NO: 41) | | |
| HUMHPA1B_PEA_1_T27 (SEQ ID | 430 | 438 |
| NO: 42) | | |
| HUMHPA1B_PEA_1_T29 (SEQ ID | 281 | 289 |
| NO: 43) | | |

[0633] Segment cluster HUMHPA1B_PEA_{—}1_node_{—}53 (SEQ ID NO:97) according to the present invention can be found in the following transcript(s): HUMHPA1B_PEA_{—}1_T1 (SEQ ID NO:34), HUMHPA1B_PEA_{—}1_T4 (SEQ ID NO:35), HUMHPA1B_PEA_{—}1_T6 (SEQ ID NO:36), HUMHPA1B_PEA_{—}1_T7 (SEQ ID NO:37, HUMHPA1B_PEA_{—}1_T12 (SEQ ID NO:38), HUMHPA1B_PEA_{—}1_T16 (SEQ ID NO:39, HUMHPA1B_PEA_{—}1_T19 (SEQ ID NO:40), HUMHPA1B_PEA_{—}1_T20 (SEQ ID NO:41), HUMHPA1B_PEA_{—}1_T27 (SEQ ID NO:42) and HUMHPA1B_PEA_{—}1_T29 (SEQ ID NO:43). Table 96 below describes the starting and ending position of this segment on each transcript.

TABLE 96
Segment location on transcripts

| | | Segment |
|---|---|---|
| | Segment | ending |
| Transcript name | starting position | position |
| HUMHPA1B_PEA_1_T1 (SEQ ID | 559 | 567 |
| NO: 34) | | |
| HUMHPA1B_PEA_1_T4 (SEQ ID | 1496 | 1504 |
| NO: 35) | | |
| HUMHPA1B_PEA_1_T6 (SEQ ID | 1494 | 1502 |
| NO: 36) | | |
| HUMHPA1B_PEA_1_T7 (SEQ ID | 1659 | 1667 |
| NO: 37) | | |
| HUMHPA1B_PEA_1_T12 (SEQ ID | 559 | 567 |
| NO: 38) | | |
| HUMHPA1B_PEA_1_T16 (SEQ ID | 467 | 475 |
| NO: 39) | | |
| HUMHPA1B_PEA_1_T19 (SEQ ID | 616 | 624 |
| NO: 40) | | |
| HUMHPA1B_PEA_1_T20 (SEQ ID | 415 | 423 |
| NO: 41) | | |
| HUMHPA1B_PEA_1_T27 (SEQ ID | 439 | 447 |
| NO: 42) | | |
| HUMHPA1B_PEA_1_T29 (SEQ ID | 290 | 298 |
| NO: 43) | | |

[0634] Segment cluster HUMHPA1B_PEA_{—}1_node_{—}54 (SEQ ID NO:98) according to the present invention can be found in the following transcript(s): HUMHPA1B_PEA_{—}1_T1 (SEQ ID NO:34), HUMHPA1B_PEA_{—}1_T4 (SEQ ID NO:35, HUMHPA1B_PEA_{—}1_T6 (SEQ ID NO:36), HUMHPA1B_PEA_{—}1_T7 (SEQ ID NO:37), HUMHPA1B_PEA_{—}1_T12 (SEQ ID NO:38), HUMHPA1B_PEA_{—}1_T16 (SEQ ID NO:39), HUMHPA1B_PEA_{—}1_T19 (SEQ ID NO:40), HUMHPA1B_PEA_{—}1_T20 (SEQ ID NO:41, HUMHPA1B_PEA_{—}1_T27 (SEQ ID NO:42) and HUMHPA1B_PEA_{—}1_T29 (SEQ ID NO:43). Table 97 below describes the starting and ending position of this segment on each transcript.

TABLE 97
Segment location on transcripts

| | | Segment |
|---|---|---|
| | Segment | ending |
| Transcript name | starting position | position |
| HUMHPA1B_PEA_1_T1 (SEQ ID | 568 | 574 |
| NO: 34) | | |
| HUMHPA1B_PEA_1_T4 (SEQ ID | 1505 | 1511 |
| NO: 35) | | |
| HUMHPA1B_PEA_1_T6 (SEQ ID | 1503 | 1509 |
| NO: 36) | | |
| HUMHPA1B_PEA_1_T7 (SEQ ID | 1668 | 1674 |
| NO: 37) | | |
| HUMHPA1B_PEA_1_T12 (SEQ ID | 568 | 574 |
| NO: 38) | | |
| HUMHPA1B_PEA_1_T16 (SEQ ID | 476 | 482 |
| NO: 39) | | |
| HUMHPA1B_PEA_1_T19 (SEQ ID | 625 | 631 |
| NO: 40) | | |
| HUMHPA1B_PEA_1_T20 (SEQ ID | 424 | 430 |
| NO: 41) | | |
| HUMHPA1B_PEA_1_T27 (SEQ ID | 448 | 454 |
| NO: 42) | | |
| HUMHPA1B_PEA_1_T29 (SEQ ID | 299 | 305 |
| NO: 43) | | |

[0635] Segment cluster HUMHPA1B_PEA_{—}1_node_{—}55 (SEQ ID NO:99) according to the present invention is supported by 113 libraries. The number of libraries was determined as previously described. This segment can be found in the following transcript(s): HUMHPA1B_PEA_{—}1_T1 (SEQ ID NO:34), HUMHPA1B_PEA_{—}1_T4 (SEQ ID NO:35), HUMHPA1B_PEA_{—}1_T6 (SEQ ID NO:36), HUMHPA1B_PEA_{—}1_T7 (SEQ ID NO:37), HUMHPA1B_PEA_{—}1_T12 (SEQ ID NO:38), HUMHPA1B_PEA_{—}1_T16 (SEQ ID NO:39), HUMHPA1B_PEA_{—}1_T19 (SEQ ID NO:40, HUMHPA1B_PEA_{—}1_T20 (SEQ ID NO:41), HUMHPA1B_PEA_{—}1_T27 (SEQ ID NO:42) and HUMHPA1B_PEA_{—}1_T29 (SEQ ID NO:43). Table 98 below describes the starting and ending position of this segment on each transcript.

TABLE 98
Segment location on transcripts

| | Segment | Segment |
|---|---|---|
| | starting | ending |
| Transcript name | position | position |
| HUMHPA1B_PEA_1_T1 (SEQ ID | 575 | 616 |
| NO: 34) | | |
| HUMHPA1B_PEA_1_T4 (SEQ ID | 1512 | 1553 |
| NO: 35) | | |
| HUMHPA1B_PEA_1_T6 (SEQ ID | 1510 | 1551 |
| NO: 36) | | |
| HUMHPA1B_PEA_1_T7 (SEQ ID | 1675 | 1716 |
| NO: 37) | | |
| HUMHPA1B_PEA_1_T12 (SEQ ID | 575 | 616 |
| NO: 38) | | |
| HUMHPA1B_PEA_1_T16 (SEQ ID | 483 | 524 |
| NO: 39) | | |
| HUMHPA1B_PEA_1_T19 (SEQ ID | 632 | 673 |
| NO: 40) | | |
| HUMHPA1B_PEA_1_T20 (SEQ ID | 431 | 472 |
| NO: 41) | | |
| HUMHPA1B_PEA_1_T27 (SEQ ID | 455 | 496 |
| NO: 42) | | |
| HUMHPA1B_PEA_1_T29 (SEQ ID | 306 | 347 |
| NO: 43) | | |

[0636] Segment cluster HUMHPA1B_PEA_{—}1_node_{—}56 (SEQ ID NO:100) according to the present invention can be found in the following transcript(s): HUMHPA1B_PEA_{—}1_T1 (SEQ ID NO:34), HUMHPA1B_PEA_{—}1_T4 (SEQ ID NO:35), HUMHPA1B_PEA_{—}1_T6 (SEQ ID NO:36), HUMHPA1B_PEA_{—}1_T7 (SEQ ID NO:37), HUMHPA1B_PEA_{—}1_T12 (SEQ ID NO:38), HUMHPA1B_PEA_{—}1_T16 (SEQ ID NO:39, HUMHPA1B_PEA_{—}1_T19 (SEQ ID NO:40), HUMHPA1B_PEA_{—}1_T20 (SEQ ID NO:41), HUMHPA1B_PEA_{—}1_T27 (SEQ ID NO:42) and HUMHPA1B_PEA_{—}1_T29 (SEQ ID NO:43). Table 99 below describes the starting and ending position of this segment on each transcript.

TABLE 99
Segment location on transcripts

| | Segment | Segment |
|---|---|---|
| | starting | ending |
| Transcript name | position | position |
| HUMHPA1B_PEA_1_T1 (SEQ ID | 617 | 622 |
| NO: 34) | | |
| HUMHPA1B_PEA_1_T4 (SEQ ID | 1554 | 1559 |
| NO: 35) | | |
| HUMHPA1B_PEA_1_T6 (SEQ ID | 1552 | 1557 |
| NO: 36) | | |
| HUMHPA1B_PEA_1_T7 (SEQ ID | 1717 | 1722 |
| NO: 37) | | |
| HUMHPA1B_PEA_1_T12 (SEQ ID | 617 | 622 |
| NO: 38) | | |
| HUMHPA1B_PEA_1_T16 (SEQ ID | 525 | 530 |
| NO: 39) | | |
| HUMHPA1B_PEA_1_T19 (SEQ ID | 674 | 679 |
| NO: 40) | | |
| HUMHPA1B_PEA_1_T20 (SEQ ID | 473 | 478 |
| NO: 41) | | |
| HUMHPA1B_PEA_1_T27 (SEQ ID | 497 | 502 |
| NO: 42) | | |
| HUMHPA1B_PEA_1_T29 (SEQ ID | 348 | 353 |
| NO: 43) | | |

[0637] Segment cluster HUMHPA1B_PEA_{—}1_node_{—}57 (SEQ ID NO:101) according to the present invention is supported by 110 libraries. The number of libraries was determined as previously described. This segment can be found in the following transcript(s): HUMHPA1B_PEA_{—}1_T1 (SEQ ID NO:34), HUMHPA1B_PEA_{—}1_T4 (SEQ ID NO:35), HUMHPA1B_PEA_{—}1_T6 (SEQ ID NO:36), HUMHPA1B_PEA_{—}1_T7 (SEQ ID NO:37), HUMHPA1B_PEA_{—}1_T12 (SEQ ID NO:38), HUMHPA1B_PEA_{—}1_T16 (SEQ ID NO:39), HUMHPA1B_PEA_{—}1_T19 (SEQ ID NO:40), HUMHPA1B_PEA_{—}1_T20 (SEQ ID NO:41), HUMHPA1B_PEA_{—}1_T27 (SEQ ID NO:42) and HUMHPA1B_PEA_{—}1_T29 (SEQ ID NO:43). Table 100 below describes the starting and ending position of this segment on each transcript.

TABLE 100
Segment location on transcripts

| | Segment | Segment |
|---|---|---|
| | starting | ending |
| Transcript name | position | position |
| HUMHPA1B_PEA_1_T1 (SEQ ID | 623 | 649 |
| NO: 34) | | |
| HUMHPA1B_PEA_1_T4 (SEQ ID | 1560 | 1586 |
| NO: 35) | | |
| HUMHPA1B_PEA_1_T6 (SEQ ID | 1558 | 1584 |
| NO: 36) | | |
| HUMHPA1B_PEA_1_T7 (SEQ ID | 1723 | 1749 |
| NO: 37) | | |
| HUMHPA1B_PEA_1_T12 (SEQ ID | 623 | 649 |
| NO: 38) | | |
| HUMHPA1B_PEA_1_T16 (SEQ ID | 531 | 557 |
| NO: 39) | | |
| HUMHPA1B_PEA_1_T19 (SEQ ID | 680 | 706 |
| NO: 40) | | |
| HUMHPA1B_PEA_1_T20 (SEQ ID | 479 | 505 |
| NO: 41) | | |
| HUMHPA1B_PEA_1_T27 (SEQ ID | 503 | 529 |
| NO: 42) | | |
| HUMHPA1B_PEA_1_T29 (SEQ ID | 354 | 380 |
| NO: 43) | | |

[0638] Segment cluster HUMHPA1B_PEA_{—}1_node_{—}58 (SEQ ID NO:102) according to the present invention is supported by 108 libraries. The number of libraries was determined as previously described. This segment can be found in the following transcript(s): HUMHPA1B_PEA_{—}1_T1 (SEQ ID NO:34), HUMHPA1B_PEA_{—}1_T4 (SEQ ID NO:35), HUMHPA1B_PEA_{—}1_T6 (SEQ ID NO:36), HUMHPA1B_PEA_{—}1_T7 (SEQ ID NO:37), HUMHPA1B_PEA_{—}1_T12 (SEQ ID NO:38), HUMHPA1B_PEA_{—}1_T16 (SEQ ID NO:39), HUMHPA1B_PEA_{—}1_T19 (SEQ ID NO:40, HUMHPA1B_PEA_{—}1_T20 (SEQ ID NO:41), HUMHPA1B_PEA_{—}1_T27 (SEQ ID NO:42) and HUMHPA1B_PEA_{—}1_T29 (SEQ ID NO:43). Table 101 below describes the starting and ending position of this segment on each transcript.

TABLE 101
Segment location on transcripts

| | Segment | Segment |
|---|---|---|
| | starting | ending |
| Transcript name | position | position |
| HUMHPA1B_PEA_1_T1 (SEQ ID | 650 | 684 |
| NO: 34) | | |
| HUMHPA1B_PEA_1_T4 (SEQ ID | 1587 | 1621 |
| NO: 35) | | |
| HUMHPA1B_PEA_1_T6 (SEQ ID | 1585 | 1619 |
| NO: 36) | | |
| HUMHPA1B_PEA_1_T7 (SEQ ID | 1750 | 1784 |
| NO: 37) | | |
| HUMHPA1B_PEA_1_T12 (SEQ ID | 650 | 684 |
| NO: 38) | | |
| HUMHPA1B_PEA_1_T16 (SEQ ID | 558 | 592 |
| NO: 39) | | |
| HUMHPA1B_PEA_1_T19 (SEQ ID | 707 | 741 |
| NO: 40) | | |
| HUMHPA1B_PEA_1_T20 (SEQ ID | 506 | 540 |
| NO: 41) | | |
| HUMHPA1B_PEA_1_T27 (SEQ ID | 530 | 564 |
| NO: 42) | | |
| HUMHPA1B_PEA_1_T29 (SEQ ID | 381 | 415 |
| NO: 43) | | |

[0639] Segment cluster HUMHPA1B_PEA_{—}1 node_{—}59 (SEQ ID NO:103) according to the present invention can be found in the following transcript(s): HUMHPA1B_PEA_{—}1_T1 (SEQ ID NO:34), HUMHPA1B_PEA_T4 (SEQ ID NO:35), HUMHPA1B_PEA_{—}1_T6 (SEQ ID NO:36), HUMHPA1B_PEA_{—}1_T7 (SEQ ID NO:37), HUMHPA1B_PEA_{—}1_T12 (SEQ ID NO:38), HUMHPA1B_PEA_{—}1_T16 (SEQ ID NO:39), HUMHPA1B_PEA_{—}1_T19 (SEQ ID NO:40), HUMHPA1B_PEA_{—}1_T20 (SEQ ID NO:41), HUMHPA1B_PEA_{—}1_T27 (SEQ ID NO:42) and HUMHPA1B_PEA_{—}1_T29 (SEQ ID NO:43). Table 102 below describes the starting and ending position of this segment on each transcript.

TABLE 102
Segment location on transcripts

| | Segment | Segment |
|---|---|---|
| | starting | ending |
| Transcript name | position | position |
| HUMHPA1B_PEA_1_T1 (SEQ ID | 685 | 692 |
| NO: 34) | | |
| HUMHPA1B_PEA_1_T4 (SEQ ID | 1622 | 1629 |
| NO: 35) | | |
| HUMHPA1B_PEA_1_T6 (SEQ ID | 1620 | 1627 |
| NO: 36) | | |
| HUMHPA1B_PEA_1_T7 (SEQ ID | 1785 | 1792 |
| NO: 37) | | |
| HUMHPA1B_PEA_1_T12 (SEQ ID | 685 | 692 |
| NO: 38) | | |
| HUMHPA1B_PEA_1_T16 (SEQ ID | 593 | 600 |
| NO: 39) | | |
| HUMHPA1B_PEA_1_T19 (SEQ ID | 742 | 749 |
| NO: 40) | | |
| HUMHPA1B_PEA_1_T20 (SEQ ID | 541 | 548 |
| NO: 41) | | |
| HUMHPA1B_PEA_1_T27 (SEQ ID | 565 | 572 |
| NO: 42) | | |
| HUMHPA1B_PEA_1_T29 (SEQ ID | 416 | 423 |
| NO: 43) | | |

[0640] Segment cluster HUMHPA1_B_PEA_{—}1_node_{—}60 (SEQ ID NO:104) according to the present invention can be found in the following transcript(s): HUMHPA1B_PEA_{—}1_T1 (SEQ ID NO:34), HUMHPA1B_PEA_{—}1_T4 (SEQ ID NO:35), HUMHPA1B_PEA_{—}1_T6 (SEQ ID NO:36), HUMHPA1B_PEA_{—}1_T7 (SEQ ID NO:37), HUMHPA1B_PEA_{—}1_T12 (SEQ ID NO:38), HUMHPA1B_PEA_{—}1_T16 (SEQ ID NO:39), HUMHPA1B_PEA_{—}1_T19 (SEQ ID NO:40), HUMHPA1B_PEA_{—}1_T20 (SEQ ID NO:41), HUMHPA1B_PEA_{—}1_T27 (SEQ ID NO:42) and HUMHPA1B_PEA_{—}1_T29 (SEQ ID NO:43. Table 103 below describes the starting and ending position of this segment on each transcript.

TABLE 103
Segment location on transcripts

| | Segment | Segment |
|---|---|---|
| | starting | ending |
| Transcript name | position | position |
| HUMHPA1B_PEA_1_T1 (SEQ ID | 693 | 700 |
| NO: 34) | | |
| HUMHPA1B_PEA_1_T4 (SEQ ID | 1630 | 1637 |
| NO: 35) | | |
| HUMHPA1B_PEA_1_T6 (SEQ ID | 1628 | 1635 |
| NO: 36) | | |
| HUMHPA1B_PEA_1_T7 (SEQ ID | 1793 | 1800 |
| NO: 37) | | |
| HUMHPA1B_PEA_1_T12 (SEQ ID | 693 | 700 |
| NO: 38) | | |
| HUMHPA1B_PEA_1_T16 (SEQ ID | 601 | 608 |
| NO: 39) | | |
| HUMHPA1B_PEA_1_T19 (SEQ ID | 750 | 757 |
| NO: 40) | | |
| HUMHPA1B_PEA_1_T20 (SEQ ID | 549 | 556 |
| NO: 41) | | |
| HUMHPA1B_PEA_1_T27 (SEQ ID | 573 | 580 |
| NO: 42) | | |
| HUMHPA1B_PEA_1_T29 (SEQ ID | 424 | 431 |
| NO: 43) | | |

[0641] Segment cluster HUMHPA1B_PEA_{—}1_node_{—}61 (SEQ ID NO:105) according to the present invention can be found in the following transcript(s): HUMHPA1B_PEA_{—}1_T1 (SEQ ID NO:34), HUMHPA1B_PEA_{—}1_T4 (SEQ ID NO:35), HUMHPA1B_PEA_{—}1_T6 (SEQ ID NO:36), HUMHPA1B_PEA_{—}1_T7 (SEQ ID NO:37), HUMHPA1B_PEA_{—}1_T12 (SEQ ID NO:38), HUMHPA1B_PEA_{—}1_T16 (SEQ ID NO:39), HUMHPA1B_PEA_{—}1_T19 (SEQ ID NO:40), HUMHPA1B_PEA_{—}1_T20 (SEQ ID NO:41), HUMHPA1B_PEA_{—}1_T27 (SEQ ID NO:42) and HUMHPA1B_PEA_{—}1_T29 (SEQ ID NO:43. Table 104 below describes the starting and ending position of this segment on each transcript.

TABLE 104
Segment location on transcripts

| | Segment | Segment |
|---|---|---|
| | starting | ending |
| Transcript name | position | position |
| HUMHPA1B_PEA_1_T1 (SEQ ID | 701 | 712 |
| NO: 34) | | |
| HUMHPA1B_PEA_1_T4 (SEQ ID | 1638 | 1649 |
| NO: 35) | | |
| HUMHPA1B_PEA_1_T6 (SEQ ID | 1636 | 1647 |
| NO: 36) | | |
| HUMHPA1B_PEA_1_T7 (SEQ ID | 1801 | 1812 |
| NO: 37) | | |
| HUMHPA1B_PEA_1_T12 (SEQ ID | 701 | 712 |
| NO: 38) | | |
| HUMHPA1B_PEA_1_T16 (SEQ ID | 609 | 620 |
| NO: 39) | | |
| HUMHPA1B_PEA_1_T19 (SEQ ID | 758 | 769 |
| NO: 40) | | |
| HUMHPA1B_PEA_1_T20 (SEQ ID | 557 | 568 |
| NO: 41) | | |
| HUMHPA1B_PEA_1_T27 (SEQ ID | 581 | 592 |
| NO: 42) | | |
| HUMHPA1B_PEA_1_T29 (SEQ ID | 432 | 443 |
| NO: 43) | | |

[0642] Segment cluster HUMHPA1B_PEA_{—}1_node_{—}62 (SEQ ID NO:106) according to the present invention can be found in the following transcript(s): HUMHPA1B_PEA_{—}1_T1 (SEQ ID NO:34), HUMHPA1B_PEA_{—}1_T4 (SEQ ID NO:35), HUMHPA1B_PEA_{—}1_T6 (SEQ ID NO:36), HUMHPA1B_PEA_{—}1_T7 (SEQ ID NO:37), HUMHPA1B_PEA_{—}1_T12 (SEQ ID NO:38), HUMHPA1B_PEA_{—}1_T16 (SEQ ID NO:39), HUMHPA1B_PEA_{—}1_T19 (SEQ ID NO:40), HUMHPA1B_PEA_{—}1_T20 (SEQ ID NO:41), HUMHPA1B_PEA_{—}1_T27 (SEQ ID NO:42) and HUMHPA1B_PEA_{—}1_T29 (SEQ ID NO:43). Table 105 below describes the starting and ending position of this segment on each transcript.

TABLE 105
Segment location on transcripts

| | Segment | Segment |
|---|---|---|
| | starting | ending |
| Transcript name | position | position |
| HUMHPA1B_PEA_1_T1 (SEQ ID | 713 | 723 |
| NO: 34) | | |
| HUMHPA1B_PEA_1_T4 (SEQ ID | 1650 | 1660 |
| NO: 35) | | |
| HUMHPA1B_PEA_1_T6 (SEQ ID | 1648 | 1658 |
| NO: 36) | | |
| HUMHPA1B_PEA_1_T7 (SEQ ID | 1813 | 1823 |
| NO: 37) | | |
| HUMHPA1B_PEA_1_T12 (SEQ ID | 713 | 723 |
| NO: 38) | | |
| HUMHPA1B_PEA_1_T16 (SEQ ID | 621 | 631 |
| NO: 39) | | |
| HUMHPA1B_PEA_1_T19 (SEQ ID | 770 | 780 |
| NO: 40) | | |
| HUMHPA1B_PEA_1_T20 (SEQ ID | 569 | 579 |
| NO: 41) | | |
| HUMHPA1B_PEA_1_T27 (SEQ ID | 593 | 603 |
| NO: 42) | | |
| HUMHPA1B_PEA_1_T29 (SEQ ID | 444 | 454 |
| NO: 43) | | |

[0643] Segment cluster HUMHPA1B_PEA_{—}1_node_{—}63 (SEQ ID NO:107) according to the present invention is supported by 112 libraries. The number of libraries was determined as previously described. This segment can be found in the following transcript(s): HUMHPA1B_PEA_{—}1_T1 (SEQ ID NO:34), HUMHPA1B_PEA_{—}1_T4 (SEQ ID NO:35), HUMHPA1B_PEA_{—}1_T6 (SEQ ID NO:36), HUMHPA1B_PEA_{—}1_T7 (SEQ ID NO:37), HUMHPA1B_PEA_{—}1_T12 (SEQ ID NO:38), HUMHPA1B_PEA_{—}1_T16 (SEQ ID NO:39), HUMHPA1B_PEA_{—}1_T19 (SEQ ID NO:40, HUMHPA1B_PEA_{—}1_T20 (SEQ ID NO:41), HUMHPA1B_PEA_{—}1_T27 (SEQ ID NO:42) and HUMHPA1B_PEA_{—}1_T29 (SEQ ID NO:43 Table 106 below describes the starting and ending position of this segment on each transcript.

TABLE 106
Segment location on transcripts

| | Segment | Segment |
|---|---|---|
| | starting | ending |
| Transcript name | position | position |
| HUMHPA1B_PEA_1_T1 (SEQ ID | 724 | 767 |
| NO: 34) | | |
| HUMHPA1B_PEA_1_T4 (SEQ ID | 1661 | 1704 |
| NO: 35) | | |
| HUMHPA1B_PEA_1_T6 (SEQ ID | 1659 | 1702 |
| NO: 36) | | |
| HUMHPA1B_PEA_1_T7 (SEQ ID | 1824 | 1867 |
| NO: 37) | | |
| HUMHPA1B_PEA_1_T12 (SEQ ID | 724 | 767 |
| NO: 38) | | |
| HUMHPA1B_PEA_1_T16 (SEQ ID | 632 | 675 |
| NO: 39) | | |
| HUMHPA1B_PEA_1_T19 (SEQ ID | 781 | 824 |
| NO: 40) | | |
| HUMHPA1B_PEA_1_T20 (SEQ ID | 580 | 623 |
| NO: 41) | | |
| HUMHPA1B_PEA_1_T27 (SEQ ID | 604 | 647 |
| NO: 42) | | |
| HUMHPA1B_PEA_1_T29 (SEQ ID | 455 | 498 |
| NO: 43) | | |

[0644] Segment cluster HUMHPA1B_PEA_{—}1_node_{—}64 (SEQ ID NO:108) according to the present invention is supported by 115 libraries. The number of libraries was determined as previously described. This segment can be found in the following transcript(s): HUMHPA1B_PEA_{—}1_T1 (SEQ ID NO:34), HUMHPA1B_PEA_{—}1_T4 (SEQ ID NO:35), HUMHPA1B_PEA_{—}1_T6 (SEQ ID NO:36), HUMHPA1B_PEA_{—}1_T7 (SEQ ID NO:37), HUMHPA1B_PEA_{—}1_T12 (SEQ ID NO:38), HUMHPA1B_PEA_{—}1_T16 (SEQ ID NO:39), HUMHPA1B_PEA_{—}1_T19 (SEQ ID NO:40), HUMHPA1B_PEA_{—}1_T20 (SEQ ID NO:41), HUMHPA1B_PEA_{—}1_T27 (SEQ ID NO:42) and HUMHPA1B_PEA_{—}1_T29 (SEQ ID NO:43). Table 107 below describes the starting and ending position of this segment on each transcript.

TABLE 107
Segment location on transcripts

| | Segment | Segment |
|---|---|---|
| | starting | ending |
| Transcript name | position | position |
| HUMHPA1B_PEA_1_T1 (SEQ ID | 768 | 815 |
| NO: 34) | | |
| HUMHPA1B_PEA_1_T4 (SEQ ID | 1705 | 1752 |
| NO: 35) | | |
| HUMHPA1B_PEA_1_T6 (SEQ ID | 1703 | 1750 |
| NO: 36) | | |
| HUMHPA1B_PEA_1_T7 (SEQ ID | 1868 | 1915 |
| NO: 37) | | |
| HUMHPA1B_PEA_1_T12 (SEQ ID | 768 | 815 |
| NO: 38) | | |
| HUMHPA1B_PEA_1_T16 (SEQ ID | 676 | 723 |
| NO: 39) | | |
| HUMHPA1B_PEA_1_T19 (SEQ ID | 825 | 872 |
| NO: 40) | | |
| HUMHPA1B_PEA_1_T20 (SEQ ID | 624 | 671 |
| NO: 41) | | |
| HUMHPA1B_PEA_1_T27 (SEQ ID | 648 | 695 |
| NO: 42) | | |
| HUMHPA1B_PEA_1_T29 (SEQ ID | 499 | 546 |
| NO: 43) | | |

[0645] Segment cluster HUMHPA1B_PEA_{—}1_node_{—}65 (SEQ ID NO:109) according to the present invention can be found in the following transcript(s): HUMHPA1B_PEA_{—}1_T1 (SEQ ID NO:34), HUMHPA1B_PEA_{—}1_T4 (SEQ ID NO:35, HUMHPA1B_PEA_{—}1_T6 (SEQ ID NO:36), HUMHPA1B_PEA_{—}1_T7 (SEQ ID NO:37), HUMHPA1B_PEA_{—}1_T12 (SEQ ID NO:38), HUMHPA1B_PEA_{—}1_T16 (SEQ ID NO:39), HUMHPA1B_PEA_{—}1_T19 (SEQ ID NO:40), HUMHPA1B_PEA_{—}1_T20 (SEQ ID NO:41), HUMHPA1B_PEA_{—}1_T27 (SEQ ID NO:42) and HUMHPA1B_PEA_{—}1_T29 (SEQ ID NO:43). Table 108 below describes the starting and ending position of this segment on each transcript.

TABLE 108
Segment location on transcripts

| | | Segment |
|---|---|---|
| | Segment | ending |
| Transcript name | starting position | position |
| HUMHPA1B_PEA_1_T1 (SEQ ID | 816 | 837 |
| NO: 34) | | |
| HUMHPA1B_PEA_1_T4 (SEQ ID | 1753 | 1774 |
| NO: 35) | | |
| HUMHPA1B_PEA_1_T6 (SEQ ID | 1751 | 1772 |
| NO: 36) | | |
| HUMHPA1B_PEA_1_T7 (SEQ ID | 1916 | 1937 |
| NO: 37) | | |
| HUMHPA1B_PEA_1_T12 (SEQ ID | 816 | 837 |
| NO: 38) | | |
| HUMHPA1B_PEA_1_T16 (SEQ ID | 724 | 745 |
| NO: 39) | | |
| HUMHPA1B_PEA_1_T19 (SEQ ID | 873 | 894 |
| NO: 40) | | |
| HUMHPA1B_PEA_1_T20 (SEQ ID | 672 | 693 |
| NO: 41) | | |
| HUMHPA1B_PEA_1_T27 (SEQ ID | 696 | 717 |
| NO: 42) | | |
| HUMHPA1B_PEA_1_T29 (SEQ ID | 547 | 568 |
| NO: 43) | | |

[0646] Segment cluster HUMHPA1B_PEA_{—}1_node_{—}66 (SEQ ID NO:110) according to the present invention can be found in the following transcript(s): HUMHPA1B_PEA_{—}1_T1 (SEQ ID NO:34), HUMHPA1B_PEA_{—}1_T4 (SEQ ID NO:35), HUMHPA1B_PEA_{—}1_T6 (SEQ ID NO:36), HUMHPA1B_PEA_{—}1_T7 (SEQ ID NO:37), HUMHPA1B_PEA_{—}1_T12 (SEQ ID NO:38), HUMHPA1B_PEA_{—}1_T16 (SEQ ID NO:39), HUMHPA1B_PEA_{—}1_T19 (SEQ ID NO:40), HUMHPA1B_PEA_{—}1_T20 (SEQ ID NO:41), HUMHPA1B_PEA_{—}1_T27 (SEQ ID NO:42) and HUMHPA1B_PEA_{—}1_T29 (SEQ ID NO:43). Table 109 below describes the starting and ending position of this segment on each transcript.

TABLE 109
Segment location on transcripts

| | | Segment |
|---|---|---|
| | Segment | ending |
| Transcript name | starting position | position |
| HUMHPA1B_PEA_1_T1 (SEQ ID | 838 | 846 |
| NO: 34) | | |
| HUMHPA1B_PEA_1_T4 (SEQ ID | 1775 | 1783 |
| NO: 35) | | |
| HUMHPA1B_PEA_1_T6 (SEQ ID | 1773 | 1781 |
| NO: 36) | | |
| HUMHPA1B_PEA_1_T7 (SEQ ID | 1938 | 1946 |
| NO: 37) | | |
| HUMHPA1B_PEA_1_T12 (SEQ ID | 838 | 846 |
| NO: 38) | | |
| HUMHPA1B_PEA_1_T16 (SEQ ID | 746 | 754 |
| NO: 39) | | |
| HUMHPA1B_PEA_1_T19 (SEQ ID | 895 | 903 |
| NO: 40) | | |
| HUMHPA1B_PEA_1_T20 (SEQ ID | 694 | 702 |
| NO: 41) | | |
| HUMHPA1B_PEA_1_T27 (SEQ ID | 718 | 726 |
| NO: 42) | | |
| HUMHPA1B_PEA_1_T29 (SEQ ID | 569 | 577 |
| NO: 43) | | |

[0647] Segment cluster HUMHPA1B_PEA_{—}1_node_{—}67 (SEQ ID NO:111) according to the present invention can be found in the following transcript(s): HUMHPA1B_PEA_{—}1_T1 (SEQ ID NO:34), HUMHPA1B_PEA_{—}1_T4 (SEQ ID NO:35), HUMHPA1B_PEA_{—}1_T6 (SEQ ID NO:36), HUMHPA1B_PEA_{—}1_T7 (SEQ ID NO:37), HUMHPA1B_PEA_{—}1_T12 (SEQ ID NO:38), HUMHPA1B_PEA_{—}1_T16 (SEQ ID NO:39), HUMHPA1B_PEA_{—}1_T19 (SEQ ID NO:40), HUMHPA1B_PEA_{—}1_T20 (SEQ ID NO:41, HUMHPA1B_PEA_{—}1_T27 (SEQ ID NO:42) and HUMHPA1B_PEA_{—}1_T29 (SEQ ID NO:43). Table 110 below describes the starting and ending position of this segment on each transcript.

TABLE 110
Segment location on transcripts

| | | Segment |
|---|---|---|
| | Segment | ending |
| Transcript name | starting position | position |
| HUMHPA1B_PEA_1_T1 (SEQ ID | 847 | 856 |
| NO: 34) | | |
| HUMHPA1B_PEA_1_T4 (SEQ ID | 1784 | 1793 |
| NO: 35) | | |
| HUMHPA1B_PEA_1_T6 (SEQ ID | 1782 | 1791 |
| NO: 36) | | |
| HUMHPA1B_PEA_1_T7 (SEQ ID | 1947 | 1956 |
| NO: 37) | | |
| HUMHPA1B_PEA_1_T12 (SEQ ID | 847 | 856 |
| NO: 38) | | |
| HUMHPA1B_PEA_1_T16 (SEQ ID | 755 | 764 |
| NO: 39) | | |
| HUMHPA1B_PEA_1_T19 (SEQ ID | 904 | 913 |
| NO: 40) | | |
| HUMHPA1B_PEA_1_T20 (SEQ ID | 703 | 712 |
| NO: 41) | | |
| HUMHPA1B_PEA_1_T27 (SEQ ID | 727 | 736 |
| NO: 42) | | |
| HUMHPA1B_PEA_1_T29 (SEQ ID | 578 | 587 |
| NO: 43) | | |

[0648] Segment cluster HUMHPA1B_PEA_{—}1_node_{—}69 (SEQ ID NO:112) according to the present invention is supported by 107 libraries. The number of libraries was determined as previously described. This segment can be found in the following transcript(s): HUMHPA1B_PEA_{—}1_T1 (SEQ ID NO:34, HUMHPA1B_PEA_{—}1_T4 (SEQ ID NO:35), HUMHPA1B_PEA_{—}1_T6 (SEQ ID NO:36, HUMHPA1B_PEA_{—}1_T7 (SEQ ID NO:37), HUMHPA1B_PEA_{—}1_T12 (SEQ ID NO:38), HUMHPA1B_PEA_{—}1_T16 (SEQ ID NO:39), HUMHPA1B_PEA_{—}1_T19 (SEQ ID NO:40), HUMHPA1B_PEA_{—}1_T20 (SEQ ID NO:41), HUMHPA1B_PEA_{—}1_T27 (SEQ ID NO:42) and HUMHPA1B_PEA_{—}1_T29 (SEQ ID NO:43 Table 111 below describes the starting and ending position of this segment on each transcript.

TABLE 111
Segment location on transcripts

| | | Segment |
|---|---|---|
| | Segment | ending |
| Transcript name | starting position | position |
| HUMHPA1B_PEA_1_T1 (SEQ ID | 857 | 883 |
| NO: 34) | | |
| HUMHPA1B_PEA_1_T4 (SEQ ID | 1794 | 1820 |
| NO: 35) | | |
| HUMHPA1B_PEA_1_T6 (SEQ ID | 1792 | 1818 |
| NO: 36) | | |
| HUMHPA1B_PEA_1_T7 (SEQ ID | 1957 | 1983 |
| NO: 37) | | |
| HUMHPA1B_PEA_1_T12 (SEQ ID | 857 | 883 |
| NO: 38) | | |
| HUMHPA1B_PEA_1_T16 (SEQ ID | 765 | 791 |
| NO: 39) | | |
| HUMHPA1B_PEA_1_T19 (SEQ ID | 914 | 940 |
| NO: 40) | | |
| HUMHPA1B_PEA_1_T20 (SEQ ID | 713 | 739 |
| NO: 41) | | |
| HUMHPA1B_PEA_1_T27 (SEQ ID | 737 | 763 |
| NO: 42) | | |
| HUMHPA1B_PEA_1_T29 (SEQ ID | 588 | 614 |
| NO: 43) | | |

[0649] Segment cluster HUMHPA1B_PEA_{—}1_node_{—}70 (SEQ ID NO:113) according to the present invention can be found in the following transcript(s): HUMHPA1B_PEA_{—}1_T1 (SEQ ID NO:34), HUMHPA1B_PEA_{—}1_T4 (SEQ ID NO:35), HUMHPA1B_PEA_{—}1_T6 (SEQ ID NO:36), HUMHPA1B_PEA_{—}1_T7 (SEQ ID NO:37), HUMHPA1B_PEA_{—}1_T12 (SEQ ID NO:38), HUMHPA1B_PEA_{—}1_T16 (SEQ ID NO:39, HUMHPA1B_PEA_{—}1_T19 (SEQ ID NO:40), HUMHPA1B_PEA_{—}1_T20 (SEQ ID NO:41), HUMHPA1B_PEA_{—}1_T27 (SEQ ID NO:42), HUMHPA1B_PEA_{—}1_T29 (SEQ ID NO:43) and HUMHPA1B_PEA_{—}1_T55 (SEQ ID NO:44). Table 112 below describes the starting and ending position of this segment on each transcript.

TABLE 112
Segment location on transcripts

| | | Segment |
|---|---|---|
| | Segment | ending |
| Transcript name | starting position | position |
| HUMHPA1B_PEA_1_T1 (SEQ ID | 884 | 890 |
| NO: 34) | | |
| HUMHPA1B_PEA_1_T4 (SEQ ID | 1821 | 1827 |
| NO: 35) | | |
| HUMHPA1B_PEA_1_T6 (SEQ ID | 1819 | 1825 |
| NO: 36) | | |
| HUMHPA1B_PEA_1_T7 (SEQ ID | 1984 | 1990 |
| NO: 37) | | |
| HUMHPA1B_PEA_1_T12 (SEQ ID | 884 | 890 |
| NO: 38) | | |
| HUMHPA1B_PEA_1_T16 (SEQ ID | 792 | 798 |
| NO: 39) | | |
| HUMHPA1B_PEA_1_T19 (SEQ ID | 941 | 947 |
| NO: 40) | | |
| HUMHPA1B_PEA_1_T20 (SEQ ID | 740 | 746 |
| NO: 41) | | |
| HUMHPA1B_PEA_1_T27 (SEQ ID | 764 | 770 |
| NO: 42) | | |
| HUMHPA1B_PEA_1_T29 (SEQ ID | 615 | 621 |
| NO: 43) | | |
| HUMHPA1B_PEA_1_T55 (SEQ ID | 333 | 339 |
| NO: 44) | | |

[0650] Segment cluster HUMHPA1B_PEA_{—}1_node_{—}71 (SEQ ID NO:114) according to the present invention can be found in the following transcript(s): HUMHPA1B_PEA_{—}1_T1 (SEQ ID NO:34), HUMHPA1B_PEA_{—}1_T4 (SEQ ID NO:35), HUMHPA1B_PEA_{—}1_T6 (SEQ ID NO:36), HUMHPA1B_PEA_{—}1_T7 (SEQ ID NO:37), HUMHPA1B_PEA_{—}1_T12 (SEQ ID NO:38), HUMHPA1B_PEA_{—}1_T16 (SEQ ID NO:39), HUMHPA1B_PEA_{—}1_T19 (SEQ ID NO:40), HUMHPA1B_PEA_{—}1_T20 (SEQ ID NO:41, HUMHPA1B_PEA_{—}1_T27 (SEQ ID NO:42), HUMHPA1B_PEA_{—}1_T29 (SEQ ID NO:43) and HUMHPA1B_PEA_{—}1_T55 (SEQ ID NO:44). Table 113 below describes the starting and ending position of this segment on each transcript.

TABLE 113
Segment location on transcripts

| | | Segment |
|---|---|---|
| | Segment | ending |
| Transcript name | starting position | position |
| HUMHPA1B_PEA_1_T1 (SEQ ID | 891 | 899 |
| NO: 34) | | |
| HUMHPA1B_PEA_1_T4 (SEQ ID | 1828 | 1836 |
| NO: 35) | | |
| HUMHPA1B_PEA_1_T6 (SEQ ID | 1826 | 1834 |
| NO: 36) | | |
| HUMHPA1B_PEA_1_T7 (SEQ ID | 1991 | 1999 |
| NO: 37) | | |
| HUMHPA1B_PEA_1_T12 (SEQ ID | 891 | 899 |
| NO: 38) | | |
| HUMHPA1B_PEA_1_T16 (SEQ ID | 799 | 807 |
| NO: 39) | | |
| HUMHPA1B_PEA_1_T19 (SEQ ID | 948 | 956 |
| NO: 40) | | |
| HUMHPA1B_PEA_1_T20 (SEQ ID | 747 | 755 |
| NO: 41) | | |
| HUMHPA1B_PEA_1_T27 (SEQ ID | 771 | 779 |
| NO: 42) | | |
| HUMHPA1B_PEA_1_T29 (SEQ ID | 622 | 630 |
| NO: 43) | | |
| HUMHPA1B_PEA_1_T55 (SEQ ID | 340 | 348 |
| NO: 44) | | |

[0651] Segment cluster HUMHPA1B_PEA_{—}1_node_{—}72 (SEQ ID NO:115) according to the present invention can be found in the following transcript(s): HUMHPA1B_PEA_{—}1_T1 (SEQ ID NO:34), HUMHPA1B_PEA_{—}1_T4 (SEQ ID NO:35), HUMHPA1B_PEA_{—}1_T6 (SEQ ID NO:36), HUMHPA1B_PEA_{—}1_T7 (SEQ ID NO:37), HUMHPA1B_PEA_{—}1_T12 (SEQ ID NO:38), HUMHPA1B_PEA_{—}1_T16 (SEQ ID NO:39, HUMHPA1B_PEA_{—}1_T19 (SEQ ID NO:40), HUMHPA1B_PEA_{—}1_T20 (SEQ ID NO:41), HUMHPA1B_PEA_{—}1_T27 (SEQ ID NO:42), HUMHPA1B_PEA_{—}1_T29 (SEQ ID NO:43) and HUMHPA1B_PEA_{—}1_T55 (SEQ ID NO:44). Table 114 below describes the starting and ending position of this segment on each transcript.

TABLE 114
Segment location on transcripts

| | | Segment |
|---|---|---|
| | Segment | ending |
| Transcript name | starting position | position |
| HUMHPA1B_PEA_1_T1 (SEQ ID | 900 | 903 |
| NO: 34) | | |
| HUMHPA1B_PEA_1_T4 (SEQ ID | 1837 | 1840 |
| NO: 35) | | |
| HUMHPA1B_PEA_1_T6 (SEQ ID | 1835 | 1838 |
| NO: 36) | | |
| HUMHPA1B_PEA_1_T7 (SEQ ID | 2000 | 2003 |
| NO: 37) | | |
| HUMHPA1B_PEA_1_T12 (SEQ ID | 900 | 903 |
| NO: 38) | | |
| HUMHPA1B_PEA_1_T16 (SEQ ID | 808 | 811 |
| NO: 39) | | |
| HUMHPA1B_PEA_1_T19 (SEQ ID | 957 | 960 |
| NO: 40) | | |
| HUMHPA1B_PEA_1_T20 (SEQ ID | 756 | 759 |
| NO: 41) | | |
| HUMHPA1B_PEA_1_T27 (SEQ ID | 780 | 783 |
| NO: 42) | | |
| HUMHPA1B_PEA_1_T29 (SEQ ID | 631 | 634 |
| NO: 43) | | |
| HUMHPA1B_PEA_1_T55 (SEQ ID | 349 | 352 |
| NO: 44) | | |

[0652] Segment cluster HUMHPA1B_PEA_{—}1_node_{—}73 (SEQ ID NO:116) according to the present invention can be found in the following transcript(s): HUMHPA1B_PEA_{—}1_T1 (SEQ ID NO:34), HUMHPA1B_PEA_{—}1_T4 (SEQ ID NO:35), HUMHPA1B_PEA_{—}1_T6 (SEQ ID NO:36), HUMHPA1B_PEA_{—}1_T7 (SEQ ID NO:37), HUMHPA1B_PEA_{—}1_T12 (SEQ ID NO:38), HUMHPA1B_PEA_{—}1_T16 (SEQ ID NO:39), HUMHPA1B_PEA_{—}1_T19 (SEQ ID NO:40), HUMHPA1B_PEA_{—}1_T20 (SEQ ID NO:41), HUMHPA1B_PEA_{—}1_T27 (SEQ ID NO:42), HUMHPA1B_PEA_{—}1_T29 (SEQ ID NO:43) and HUMHPA1B_PEA_{—}1_T55 (SEQ ID NO:44). Table 115 below describes the starting and ending position of this segment on each transcript.

TABLE 115
Segment location on transcripts

| | | Segment |
|---|---|---|
| | Segment | ending |
| Transcript name | starting position | position |
| HUMHPA1B_PEA_1_T1 (SEQ ID | 904 | 920 |
| NO: 34) | | |
| HUMHPA1B_PEA_1_T4 (SEQ ID | 1841 | 1857 |
| NO: 35) | | |
| HUMHPA1B_PEA_1_T6 (SEQ ID | 1839 | 1855 |
| NO: 36) | | |
| HUMHPA1B_PEA_1_T7 (SEQ ID | 2004 | 2020 |
| NO: 37) | | |
| HUMHPA1B_PEA_1_T12 (SEQ ID | 904 | 920 |
| NO: 38) | | |
| HUMHPA1B_PEA_1_T16 (SEQ ID | 812 | 828 |
| NO: 39) | | |
| HUMHPA1B_PEA_1_T19 (SEQ ID | 961 | 977 |
| NO: 40) | | |
| HUMHPA1B_PEA_1_T20 (SEQ ID | 760 | 776 |
| NO: 41) | | |
| HUMHPA1B_PEA_1_T27 (SEQ ID | 784 | 800 |
| NO: 42) | | |
| HUMHPA1B_PEA_1_T29 (SEQ ID | 635 | 651 |
| NO: 43) | | |
| HUMHPA1B_PEA_1_T55 (SEQ ID | 353 | 369 |
| NO: 44) | | |

[0653] Segment cluster HUMHPA1B_PEA_{—}1_node_{—}74 (SEQ ID NO:117) according to the present invention can be found in the following transcript(s): HUMHPA1B_PEA_{—}1_T1 (SEQ ID NO:34), HUMHPA1B_PEA_{—}1_T4 (SEQ ID NO:35), HUMHPA1B_PEA_{—}1_T6 (SEQ ID NO:36), HUMHPA1B_PEA_{—}1_T7 (SEQ ID NO:37), HUMHPA1B_PEA_{—}1_T12 (SEQ ID NO:38), HUMHPA1B_PEA_{—}1_T16 (SEQ ID NO:39), HUMHPA1B_PEA_{—}1_T19 (SEQ ID NO:40), HUMHPA1B_PEA_{—}1_T20 (SEQ ID NO:41), HUMHPA1B_PEA_{—}1_T27 (SEQ ID NO:42), HUMHPA1B_PEA_{—}1_T29 (SEQ ID NO:43) and HUMHPA1B_PEA_{—}1_T55 (SEQ ID NO:44). Table 116 below describes the starting and ending position of this segment on each transcript.

TABLE 116
Segment location on transcripts

| | | Segment |
|---|---|---|
| | Segment | ending |
| Transcript name | starting position | position |
| HUMHPA1B_PEA_1_T1 (SEQ ID | 921 | 928 |
| NO: 34) | | |
| HUMHPA1B_PEA_1_T4 (SEQ ID | 1858 | 1865 |
| NO: 35) | | |
| HUMHPA1B_PEA_1_T6 (SEQ ID | 1856 | 1863 |
| NO: 36) | | |
| HUMHPA1B_PEA_1_T7 (SEQ ID | 2021 | 2028 |
| NO: 37) | | |
| HUMHPA1B_PEA_1_T12 (SEQ ID | 921 | 928 |
| NO: 38) | | |
| HUMHPA1B_PEA_1_T16 (SEQ ID | 829 | 836 |
| NO: 39) | | |
| HUMHPA1B_PEA_1_T19 (SEQ ID | 978 | 985 |
| NO: 40) | | |
| HUMHPA1B_PEA_1_T20 (SEQ ID | 777 | 784 |
| NO: 41) | | |
| HUMHPA1B_PEA_1_T27 (SEQ ID | 801 | 808 |
| NO: 42) | | |
| HUMHPA1B_PEA_1_T29 (SEQ ID | 652 | 659 |
| NO: 43) | | |
| HUMHPA1B_PEA_1_T55 (SEQ ID | 370 | 377 |
| NO: 44) | | |

[0654] Segment cluster HUMHPA1B_PEA_{—}1_node_{—}75 (SEQ ID NO:118) according to the present invention can be found in the following transcript(s): HUMHPA1B_PEA_{—}1_T1 (SEQ ID NO:34), HUMHPA1B_PEA_{—}1_T4 (SEQ ID NO:35), HUMHPA1B_PEA_{—}1_T6 (SEQ ID NO:36), HUMHPA1B_PEA_{—}1_T7 (SEQ ID NO:37), HUMHPA1B_PEA_{—}1_T12 (SEQ ID NO:38), HUMHPA1B_PEA_{—}1_T16 (SEQ ID NO:39, HUMHPA1B_PEA_{—}1_T9 (SEQ ID NO:40), HUMHPA1B_PEA_{—}1_T20 (SEQ ID NO:41), HUMHPA1B_PEA_{—}1_T27 (SEQ ID NO:42), HUMHPA1B_PEA_{—}1_T29 (SEQ ID NO:43) and HUMHPA1B_PEA_{—}1_T55 (SEQ ID NO:44). Table 117 below describes the starting and ending position of this segment on each transcript.

TABLE 117
Segment location on transcripts

| | | Segment |
|---|---|---|
| | Segment | ending |
| Transcript name | starting position | position |
| HUMHPA1B_PEA_1_T1 (SEQ ID | 929 | 939 |
| NO: 34) | | |
| HUMHPA1B_PEA_1_T4 (SEQ ID | 1866 | 1876 |
| NO: 35) | | |
| HUMHPA1B_PEA_1_T6 (SEQ ID | 1864 | 1874 |
| NO: 36) | | |
| HUMHPA1B_PEA_1_T7 (SEQ ID | 2029 | 2039 |
| NO: 37) | | |
| HUMHPA1B_PEA_1_T12 (SEQ ID | 929 | 939 |
| NO: 38) | | |
| HUMHPA1B_PEA_1_T16 (SEQ ID | 837 | 847 |
| NO: 39) | | |
| HUMHPA1B_PEA_1_T19 (SEQ ID | 986 | 996 |
| NO: 40) | | |
| HUMHPA1B_PEA_1_T20 (SEQ ID | 785 | 795 |
| NO: 41) | | |
| HUMHPA1B_PEA_1_T27 (SEQ ID | 809 | 819 |
| NO: 42) | | |
| HUMHPA1B_PEA_1_T29 (SEQ ID | 660 | 670 |
| NO: 43) | | |
| HUMHPA1B_PEA_1_T55 (SEQ ID | 378 | 388 |
| NO: 44) | | |

[0655] Segment cluster HUMHPA1B_PEA_{—}1_node_{—}76 (SEQ ID NO:119) according to the present invention can be found in the following transcript(s): HUMHPA1B_PEA_{—}1_T1 (SEQ ID NO:34), HUMHPA1B_PEA_{—}1_T4 (SEQ ID NO:35), HUMHPA1B_PEA_{—}1_T6 (SEQ ID NO:36), HUMHPA1B_PEA_{—}1_T7 (SEQ ID NO:37), HUMHPA1B_PEA_{—}1_T12 (SEQ ID NO:38), HUMHPA1B_PEA_{—}1_T16 (SEQ ID NO:39, HUMHPA1B_PEA_{—}1_T19 (SEQ ID NO:40), HUMHPA1B_PEA_{—}1_T20 (SEQ ID NO:41), HUMHPA1B_PEA_{—}1_T27 (SEQ ID NO:42), HUMHPA1B_PEA_{—}1_T29 (SEQ ID NO:43) and HUMHPA1B_PEA_{—}1_T55 (SEQ ID NO:44). Table 118 below describes the starting and ending position of this segment on each transcript.

TABLE 118
Segment location on transcripts

| | Segment | Segment |
|---|---|---|
| | starting | ending |
| Transcript name | position | position |
| HUMHPA1B_PEA_1_T1 (SEQ ID | 940 | 960 |
| NO: 34) | | |
| HUMHPA1B_PEA_1_T4 (SEQ ID | 1877 | 1897 |
| NO: 35) | | |
| HUMHPA1B_PEA_1_T6 (SEQ ID | 1875 | 1895 |
| NO: 36) | | |
| HUMHPA1B_PEA_1_T7 (SEQ ID | 2040 | 2060 |
| NO: 37) | | |
| HUMHPA1B_PEA_1_T12 (SEQ ID | 940 | 960 |
| NO: 38) | | |
| HUMHPA1B_PEA_1_T16 (SEQ ID | 848 | 868 |
| NO: 39) | | |
| HUMHPA1B_PEA_1_T19 (SEQ ID | 997 | 1017 |
| NO: 40) | | |
| HUMHPA1B_PEA_1_T20 (SEQ ID | 796 | 816 |
| NO: 41) | | |
| HUMHPA1B_PEA_1_T27 (SEQ ID | 820 | 840 |
| NO: 42) | | |
| HUMHPA1B_PEA_1_T29 (SEQ ID | 671 | 691 |
| NO: 43) | | |
| HUMHPA1B_PEA_1_T55 (SEQ ID | 389 | 409 |
| NO: 44) | | |

[0656] Segment cluster HUMHPA1B_PEA_{—}1_node_{—}77 (SEQ ID NO:120) according to the present invention can be found in the following transcript(s): HUMHPA1B_PEA_{—}1_T1 (SEQ ID NO:34), HUMHPA1B_PEA_{—}1_T4 (SEQ ID NO:35), HUMHPA1B_PEA_{—}1_T6 (SEQ ID NO:36), HUMHPA1B_PEA_{—}1_T7 (SEQ ID NO:37), HUMHPA1B_PEA_{—}1_T12 (SEQ ID NO:38), HUMHPA1B_PEA_{—}1_T16 (SEQ ID NO:39), HUMHPA1B_PEA_{—}1_T19 (SEQ ID NO:40), HUMHPA1B_PEA_{—}1_T20 (SEQ ID NO:41, HUMHPA1B_PEA_{—}1_T27 (SEQ ID NO:42), HUMHPA1B_PEA_{—}1_T29 (SEQ ID NO:43), HUMHPA1B_PEA_{—}1_T55 (SEQ ID NO:44) and HUMHPA1B_PEA_{—}1_T56 (SEQ ID NO:45. Table 119 below describes the starting and ending position of this segment on each transcript.

TABLE 119
Segment location on transcripts

| | Segment | Segment |
|---|---|---|
| | starting | ending |
| Transcript name | position | position |
| HUMHPA1B_PEA_1_T1 (SEQ ID | 961 | 979 |
| NO: 34) | | |
| HUMHPA1B_PEA_1_T4 (SEQ ID | 1898 | 1916 |
| NO: 35) | | |
| HUMHPA1B_PEA_1_T6 (SEQ ID | 1896 | 1914 |
| NO: 36) | | |
| HUMHPA1B_PEA_1_T7 (SEQ ID | 2061 | 2079 |
| NO: 37) | | |
| HUMHPA1B_PEA_1_T12 (SEQ ID | 961 | 979 |
| NO: 38) | | |
| HUMHPA1B_PEA_1_T16 (SEQ ID | 869 | 887 |
| NO: 39) | | |
| HUMHPA1B_PEA_1_T19 (SEQ ID | 1018 | 1036 |
| NO: 40) | | |
| HUMHPA1B_PEA_1_T20 (SEQ ID | 817 | 835 |
| NO: 41) | | |
| HUMHPA1B_PEA_1_T27 (SEQ ID | 841 | 859 |
| NO: 42) | | |
| HUMHPA1B_PEA_1_T29 (SEQ ID | 692 | 710 |
| NO: 43) | | |
| HUMHPA1B_PEA_1_T55 (SEQ ID | 410 | 428 |
| NO: 44) | | |
| HUMHPA1B_PEA_1_T56 (SEQ ID | 453 | 471 |
| NO: 45) | | |

[0657] Segment cluster HUMHPA1B_PEA_{—}1_node_{—}78 (SEQ ID NO:121) according to the present invention can be found in the following transcript(s): HUMHPA1B_PEA_{—}1_T1 (SEQ ID NO:34), HUMHPA1B_PEA_{—}1_T4 (SEQ ID NO:35), HUMHPA1B_PEA_{—}1_T6 (SEQ ID NO:36), HUMHPA1B_PEA_{—}1_T7 (SEQ ID NO:37), HUMHPA1B_PEA_{—}1_T12 (SEQ ID NO:38), HUMHPA1B_PEA_{—}1_T16 (SEQ ID NO:39), HUMHPA1B_PEA_{—}1_T19 (SEQ ID NO:40), HUMHPA1B_PEA_{—}1_T20 (SEQ ID NO:41), HUMHPA1B_PEA_{—}1_T27 (SEQ ID NO:42), HUMHPA1B_PEA_{—}1_T29 (SEQ ID NO:43), HUMHPA1B_PEA_{—}1_T55 (SEQ ID NO:44) and HUMHPA1B_PEA_{—}1_T56 (SEQ ID NO:45). Table 120 below describes the starting and ending position of this segment on each transcript.

TABLE 120
Segment location on transcripts

| | Segment | Segment |
|---|---|---|
| | starting | ending |
| Transcript name | position | position |
| HUMHPA1B_PEA_1_T1 (SEQ ID | 980 | 988 |
| NO: 34) | | |
| HUMHPA1B_PEA_1_T4 (SEQ ID | 1917 | 1925 |
| NO: 35) | | |
| HUMHPA1B_PEA_1_T6 (SEQ ID | 1915 | 1923 |
| NO: 36) | | |
| HUMHPA1B_PEA_1_T7 (SEQ ID | 2080 | 2088 |
| NO: 37) | | |
| HUMHPA1B_PEA_1_T12 (SEQ ID | 980 | 988 |
| NO: 38) | | |
| HUMHPA1B_PEA_1_T16 (SEQ ID | 888 | 896 |
| NO: 39) | | |
| HUMHPA1B_PEA_1_T19 (SEQ ID | 1037 | 1045 |
| NO: 40) | | |
| HUMHPA1B_PEA_1_T20 (SEQ ID | 836 | 844 |
| NO: 41) | | |
| HUMHPA1B_PEA_1_T27 (SEQ ID | 860 | 868 |
| NO: 42) | | |
| HUMHPA1B_PEA_1_T29 (SEQ ID | 711 | 719 |
| NO: 43) | | |
| HUMHPA1B_PEA_1_T55 (SEQ ID | 429 | 437 |
| NO: 44) | | |
| HUMHPA1B_PEA_1_T56 (SEQ ID | 472 | 480 |
| NO: 45) | | |

[0658] Segment cluster HUMHPA1B_PEA_{—}1_node_{—}79 (SEQ ID NO:122) according to the present invention can be found in the following transcript(s): HUMHPA1B_PEA_{—}1_T1 (SEQ ID NO:34), HUMHPA1B_PEA_{—}1_T4 (SEQ ID NO:35), HUMHPA1B_PEA_{—}1_T6 (SEQ ID NO:36), HUMHPA1B_PEA_{—}1_T7 (SEQ ID NO:37), HUMHPA1B_PEA_{—}1_T12 (SEQ ID NO:38), HUMHPA1B_PEA_{—}1_T16 (SEQ ID NO:39), HUMHPA1B_PEA_{—}1_T19 (SEQ ID NO:40), HUMHPA1B_PEA_{—}1_T20 (SEQ ID NO:41), HUMHPA1B_PEA_{—}1_T27 (SEQ ID NO:42), HUMHPA1B_PEA_{—}1_T29 (SEQ ID NO:43), HUMHPA1B_PEA_{—}1_T55 (SEQ ID NO:44) and HUMHPA1B_PEA_{—}1_T56 (SEQ ID NO:45). Table 121 below describes the starting and ending position of this segment on each transcript.

TABLE 121
Segment location on transcripts

| | Segment | Segment |
|---|---|---|
| | starting | ending |
| Transcript name | position | position |
| HUMHPA1B_PEA_1_T1 (SEQ ID | 989 | 993 |
| NO: 34) | | |
| HUMHPA1B_PEA_1_T4 (SEQ ID | 1926 | 1930 |
| NO: 35) | | |
| HUMHPA1B_PEA_1_T6 (SEQ ID | 1924 | 1928 |
| NO: 36) | | |
| HUMHPA1B_PEA_1_T7 (SEQ ID | 2089 | 2093 |
| NO: 37) | | |
| HUMHPA1B_PEA_1_T12 (SEQ ID | 989 | 993 |
| NO: 38) | | |
| HUMHPA1B_PEA_1_T16 (SEQ ID | 897 | 901 |
| NO: 39) | | |
| HUMHPA1B_PEA_1_T19 (SEQ ID | 1046 | 1050 |
| NO: 40) | | |
| HUMHPA1B_PEA_1_T20 (SEQ ID | 845 | 849 |
| NO: 41) | | |
| HUMHPA1B_PEA_1_T27 (SEQ ID | 869 | 873 |
| NO: 42) | | |
| HUMHPA1B_PEA_1_T29 (SEQ ID | 720 | 724 |
| NO: 43) | | |
| HUMHPA1B_PEA_1_T55 (SEQ ID | 438 | 442 |
| NO: 44) | | |
| HUMHPA1B_PEA_1_T56 (SEQ ID | 481 | 485 |
| NO: 45) | | |

[0659] Segment cluster HUMHPA1B_PEA_{—}1_node_{—}80 (SEQ ID NO:123) according to the present invention can be found in the following transcript(s): HUMHPA1B_PEA_{—}1_T1 (SEQ ID NO:34), HUMHPA1B_PEA I_T4 (SEQ ID NO:35, HUMHPA1B_PEA_{—}1_T6 (SEQ ID NO:36), HUMHPA1B_PEA_{—}1_T7 (SEQ ID NO:37), HUMHPA1B_PEA_{—}1_T12 (SEQ ID NO:38), HUMHPA1B_PEA_{—}1_T16 (SEQ ID NO:39), HUMHPA1B_PEA_{—}1_T19 (SEQ ID NO:40), HUMHPA1B_PEA_{—}1_T20 (SEQ ID NO:41), HUMHPA1B_PEA_{—}1_T27 (SEQ ID NO:42), HUMHPA1B_PEA_{—}1_T29 (SEQ ID NO:43), HUMHPA1B_PEA_{—}1_T55 (SEQ ID NO:44) and HUMHPA1B_PEA_{—}1_T56 (SEQ ID NO:45). Table 122 below describes the starting and ending position of this segment on each transcript.

TABLE 122
Segment location on transcripts

| | Segment | Segment |
|---|---|---|
| | starting | ending |
| Transcript name | position | position |
| HUMHPA1B_PEA_1_T1 (SEQ ID | 994 | 1005 |
| NO: 34) | | |
| HUMHPA1B_PEA_1_T4 (SEQ ID | 1931 | 1942 |
| NO: 35) | | |
| HUMHPA1B_PEA_1_T6 (SEQ ID | 1929 | 1940 |
| NO: 36) | | |
| HUMHPA1B_PEA_1_T7 (SEQ ID | 2094 | 2105 |
| NO: 37) | | |
| HUMHPA1B_PEA_1_T12 (SEQ ID | 994 | 1005 |
| NO: 38) | | |
| HUMHPA1B_PEA_1_T16 (SEQ ID | 902 | 913 |
| NO: 39) | | |
| HUMHPA1B_PEA_1_T19 (SEQ ID | 1051 | 1062 |
| NO: 40) | | |
| HUMHPA1B_PEA_1_T20 (SEQ ID | 850 | 861 |
| NO: 41) | | |
| HUMHPA1B_PEA_1_T27 (SEQ ID | 874 | 885 |
| NO: 42) | | |
| HUMHPA1B_PEA_1_T29 (SEQ ID | 725 | 736 |
| NO: 43) | | |
| HUMHPA1B_PEA_1_T55 (SEQ ID | 443 | 454 |
| NO: 44) | | |
| HUMHPA1B_PEA_1_T56 (SEQ ID | 486 | 497 |
| NO: 45) | | |

[0660] Segment cluster HUMHPA1B_PEA_{—}1_node_{—}81 (SEQ ID NO:124) according to the present invention can be found in the following transcript(s): HUMHPA1B_PEA_{—}1_T1 (SEQ ID NO:34), HUMHPA1B_PEA_{—}1_T4 (SEQ ID NO:35), HUMHPA1B_PEA_{—}1_T6 (SEQ ID NO:36), HUMHPA1B_PEA_{—}1_T7 (SEQ ID NO:37), HUMHPA1B_PEA_{—}1_T12 (SEQ ID NO:38), HUMHPA1B_PEA_{—}1_T16 (SEQ ID NO:39), HUMHPA1B_PEA_{—}1_T19 (SEQ ID NO:40), HUMHPA1B_PEA_{—}1_T20 (SEQ ID NO:41, HUMHPA1B_PEA_{—}1_T27 (SEQ ID NO:42), HUMHPA1B_PEA_{—}1_T29 (SEQ ID NO:43), HUMHPA1B_PEA_{—}1_T55 (SEQ ID NO:44) and HUMHPA1B_PEA_{—}1_T56 (SEQ ID NO:45). Table 123 below describes the starting and ending position of this segment on each transcript.

TABLE 123
Segment location on transcripts

| | Segment | Segment |
|---|---|---|
| | starting | ending |
| Transcript name | position | position |
| HUMHPA1B_PEA_1_T1 (SEQ ID | 1006 | 1017 |
| NO: 34) | | |
| HUMHPA1B_PEA_1_T4 (SEQ ID | 1943 | 1954 |
| NO: 35) | | |
| HUMHPA1B_PEA_1_T6 (SEQ ID | 1941 | 1952 |
| NO: 36) | | |
| HUMHPA1B_PEA_1_T7 (SEQ ID | 2106 | 2117 |
| NO: 37) | | |
| HUMHPA1B_PEA_1_T12 (SEQ ID | 1006 | 1017 |
| NO: 38) | | |
| HUMHPA1B_PEA_1_T16 (SEQ ID | 914 | 925 |
| NO: 39) | | |
| HUMHPA1B_PEA_1_T19 (SEQ ID | 1063 | 1074 |
| NO: 40) | | |
| HUMHPA1B_PEA_1_T20 (SEQ ID | 862 | 873 |
| NO: 41) | | |
| HUMHPA1B_PEA_1_T27 (SEQ ID | 886 | 897 |
| NO: 42) | | |
| HUMHPA1B_PEA_1_T29 (SEQ ID | 737 | 748 |
| NO: 43) | | |
| HUMHPA1B_PEA_1_T55 (SEQ ID | 455 | 466 |
| NO: 44) | | |
| HUMHPA1B_PEA_1_T56 (SEQ ID | 498 | 509 |
| NO: 45) | | |

[0661] Segment cluster HUMHPA1B_PEA_{—}1_node_{—}82 (SEQ ID NO:125) according to the present invention can be found in the following transcript(s): HUMHPA1B_PEA_{—}1_T1 (SEQ ID NO:34), HUMHPA1B_PEA_{—}1_T4 (SEQ ID NO:35), HUMHPA1B_PEA_{—}1_T6 (SEQ ID NO:36), HUMHPA1B_PEA_{—}1_T7 (SEQ ID NO:37), HUMHPA1B_PEA_{—}1_T12 (SEQ ID NO:38), HUMHPA1B_PEA_{—}1_T16 (SEQ ID NO:39), HUMHPA1B_PEA_{—}1_T19 (SEQ ID NO:40), HUMHPA1B_PEA_{—}1_T20 (SEQ ID NO:41), HUMHPA1B_PEA_{—}1_T27 (SEQ ID NO:42), HUMHPA1B_PEA_{—}1_T29 (SEQ ID NO:43), HUMHPA1B_PEA_{—}1_T55 (SEQ ID NO:44) and HUMHPA1B_PEA_{—}1_T56 (SEQ ID NO:45). Table 124 below describes the starting and ending position of this segment on each transcript.

TABLE 124
Segment location on transcripts

| | Segment | Segment |
|---|---|---|
| | starting | ending |
| Transcript name | position | position |
| HUMHPA1B_PEA_1_T1 (SEQ ID | 1018 | 1029 |
| NO: 34) | | |
| HUMHPA1B_PEA_1_T4 (SEQ ID | 1955 | 1966 |
| NO: 35) | | |
| HUMHPA1B_PEA_1_T6 (SEQ ID | 1953 | 1964 |
| NO: 36) | | |
| HUMHPA1B_PEA_1_T7 (SEQ ID | 2118 | 2129 |
| NO: 37) | | |
| HUMHPA1B_PEA_1_T12 (SEQ ID | 1018 | 1029 |
| NO: 38) | | |
| HUMHPA1B_PEA_1_T16 (SEQ ID | 926 | 937 |
| NO: 39) | | |
| HUMHPA1B_PEA_1_T19 (SEQ ID | 1075 | 1086 |
| NO: 40) | | |
| HUMHPA1B_PEA_1_T20 (SEQ ID | 874 | 885 |
| NO: 41) | | |
| HUMHPA1B_PEA_1_T27 (SEQ ID | 898 | 909 |
| NO: 42) | | |
| HUMHPA1B_PEA_1_T29 (SEQ ID | 749 | 760 |
| NO: 43) | | |
| HUMHPA1B_PEA_1_T55 (SEQ ID | 467 | 478 |
| NO: 44) | | |
| HUMHPA1B_PEA_1_T56 (SEQ ID | 510 | 521 |
| NO: 45) | | |

[0662] Segment cluster HUMHPA1B_PEA_{—}1_node_{—}83 (SEQ ID NO:126) according to the present invention can be found in the following transcript(s): HUMHPA1B_PEA_{—}1_T1 (SEQ ID NO:34), HUMHPA1B_PEA_{—}1_T4 (SEQ ID NO:35), HUMHPA1B_PEA_{—}1_T6 (SEQ ID NO:36), HUMHPA1B_PEA_{—}1_T7 (SEQ ID NO:37), HUMHPA1B_PEA_{—}1_T12 (SEQ ID NO:38), HUMHPA1B_PEA_{—}1_T16 (SEQ ID NO:39), HUMHPA1B_PEA_{—}1_T19 (SEQ ID NO:40), HUMHPA1B_PEA_{—}1_T20 (SEQ ID NO:41), HUMHPA1B_PEA_{—}1_T27 (SEQ ID NO:42), HUMHPA1B_PEA_{—}1_T29 (SEQ ID NO:43), HUMHPA1B_PEA_{—}1_T55 (SEQ ID NO:44) and HUMHPA1B_PEA_{—}1_T56 (SEQ ID NO:45. Table 125 below describes the starting and ending position of this segment on each transcript.

TABLE 125
Segment location on transcripts

| | Segment | Segment |
|---|---|---|
| | starting | ending |
| Transcript name | position | position |
| HUMHPA1B_PEA_1_T1 (SEQ ID | 1030 | 1040 |
| NO: 34) | | |
| HUMHPA1B_PEA_1_T4 (SEQ ID | 1967 | 1977 |
| NO: 35) | | |
| HUMHPA1B_PEA_1_T6 (SEQ ID | 1965 | 1975 |
| NO: 36) | | |
| HUMHPA1B_PEA_1_T7 (SEQ ID | 2130 | 2140 |
| NO: 37) | | |
| HUMHPA1B_PEA_1_T12 (SEQ ID | 1030 | 1040 |
| NO: 38) | | |
| HUMHPA1B_PEA_1_T16 (SEQ ID | 938 | 948 |
| NO: 39) | | |
| HUMHPA1B_PEA_1_T19 (SEQ ID | 1087 | 1097 |
| NO: 40) | | |
| HUMHPA1B_PEA_1_T20 (SEQ ID | 886 | 896 |
| NO: 41) | | |
| HUMHPA1B_PEA_1_T27 (SEQ ID | 910 | 920 |
| NO: 42) | | |
| HUMHPA1B_PEA_1_T29 (SEQ ID | 761 | 771 |
| NO: 43) | | |
| HUMHPA1B_PEA_1_T55 (SEQ ID | 479 | 489 |
| NO: 44) | | |
| HUMHPA1B_PEA_1_T56 (SEQ ID | 522 | 532 |
| NO: 45) | | |

[0663] Segment cluster HUMHPA1B_PEA_{—}1_node_{—}84 (SEQ ID NO:127) according to the present invention is supported by 104 libraries. The number of libraries was determined as previously described. This segment can be found in the following transcript(s): HUMHPA1B_PEA_{—}1_T1 (SEQ ID NO:34), HUMHPA1B_PEA_{—}1_T4 (SEQ ID NO:35), HUMHPA1B_PEA_{—}1_T6 (SEQ ID NO:36), HUMHPA1B_PEA_{—}1_T7 (SEQ ID NO:37), HUMHPA1B_PEA_{—}1_T12 (SEQ ID NO:38), HUMHPA1B_PEA_{—}1_T16 (SEQ ID NO:39), HUMHPA1B_PEA_{—}1_T19 (SEQ ID NO:40), HUMHPA1B_PEA_{—}1_T20 (SEQ ID NO:41) HUMHPA1B_PEA_{—}1_T27 (SEQ ID NO:42), HUMHPA1B_PEA_{—}1_T29 (SEQ ID NO:43), HUMHPA1B_PEA_{—}1_T55 (SEQ ID NO:44) and HUMHPA1B_PEA_{—}1_T56 (SEQ ID NO:45). Table 126 below describes the starting and ending position of this segment on each transcript.

TABLE 126
Segment location on transcripts

| | Segment | Segment |
|---|---|---|
| | starting | ending |
| Transcript name | position | position |
| HUMHPA1B_PEA_1_T1 (SEQ ID | 1041 | 1071 |
| NO: 34) | | |
| HUMHPA1B_PEA_1_T4 (SEQ ID | 1978 | 2008 |
| NO: 35) | | |
| HUMHPA1B_PEA_1_T6 (SEQ ID | 1976 | 2006 |
| NO: 36) | | |
| HUMHPA1B_PEA_1_T7 (SEQ ID | 2141 | 2171 |
| NO: 37) | | |
| HUMHPA1B_PEA_1_T12 (SEQ ID | 1041 | 1071 |
| NO: 38) | | |
| HUMHPA1B_PEA_1_T16 (SEQ ID | 949 | 979 |
| NO: 39) | | |
| HUMHPA1B_PEA_1_T19 (SEQ ID | 1098 | 1128 |
| NO: 40) | | |
| HUMHPA1B_PEA_1_T20 (SEQ ID | 897 | 927 |
| NO: 41) | | |
| HUMHPA1B_PEA_1_T27 (SEQ ID | 921 | 951 |
| NO: 42) | | |
| HUMHPA1B_PEA_1_T29 (SEQ ID | 772 | 802 |
| NO: 43) | | |
| HUMHPA1B_PEA_1_T55 (SEQ ID | 490 | 520 |
| NO: 44) | | |
| HUMHPA1B_PEA_1_T56 (SEQ ID | 533 | 563 |
| NO: 45) | | |

[0664] Segment cluster HUMHPA1B_PEA_{—}1_node_{—}85 (SEQ ID NO:128) according to the present invention can be found in the following transcript(s): HUMHPA1B_PEA_{—}1_T1 (SEQ ID NO:34), HUMHPA1B_PEA_{—}1_T4 (SEQ ID NO:35), HUMHPA1B_PEA_{—}1_T6 (SEQ ID NO:36), HUMHPA1B_PEA_{—}1_T7 (SEQ ID NO:37), HUMHPA1B_PEA_{—}1_T12 (SEQ ID NO:38), HUMHPA1B_PEA_{—}1_T16 (SEQ ID NO:39), HUMHPA1B_PEA_{—}1_T19 (SEQ ID NO:40), HUMHPA1B_PEA_{—}1_T20 (SEQ ID NO:41), HUMHPA1B_PEA_{—}1_T27 (SEQ ID NO:42), HUMHPA1B_PEA_{—}1_T29 (SEQ ID NO:43, HUMHPA1B_PEA_{—}1_T55 (SEQ ID NO:44) and HUMHPA1B_PEA_{—}1_T56 (SEQ ID NO:45). Table 127 below describes the starting and ending position of this segment on each transcript.

TABLE 127
Segment location on transcripts

| | Segment | Segment |
|---|---|---|
| | starting | ending |
| Transcript name | position | position |
| HUMHPA1B_PEA_1_T1 (SEQ ID | 1072 | 1078 |
| NO: 34) | | |
| HUMHPA1B_PEA_1_T4 (SEQ ID | 2009 | 2015 |
| NO: 35) | | |
| HUMHPA1B_PEA_1_T6 (SEQ ID | 2007 | 2013 |
| NO: 36) | | |
| HUMHPA1B_PEA_1_T7 (SEQ ID | 2172 | 2178 |
| NO: 37) | | |
| HUMHPA1B_PEA_1_T12 (SEQ ID | 1072 | 1078 |
| NO: 38) | | |
| HUMHPA1B_PEA_1_T16 (SEQ ID | 980 | 986 |
| NO: 39) | | |
| HUMHPA1B_PEA_1_T19 (SEQ ID | 1129 | 1135 |
| NO: 40) | | |
| HUMHPA1B_PEA_1_T20 (SEQ ID | 928 | 934 |
| NO: 41) | | |
| HUMHPA1B_PEA_1_T27 (SEQ ID | 952 | 958 |
| NO: 42) | | |
| HUMHPA1B_PEA_1_T29 (SEQ ID | 803 | 809 |
| NO: 43) | | |
| HUMHPA1B_PEA_1_T55 (SEQ ID | 521 | 527 |
| NO: 44) | | |
| HUMHPA1B_PEA_1_T56 (SEQ ID | 564 | 570 |
| NO: 45) | | |

[0665] Segment cluster HUMHPA1B_PEA_{—}1_node_{—}86 (SEQ ID NO:129) according to the present invention can be found in the following transcript(s): HUMHPA1B_PEA_{—}1_T1 (SEQ ID NO:34), HUMHPA1B_PEA_{—}1_T4 (SEQ ID NO:35), HUMHPA1B_PEA_{—}1_T6 (SEQ ID NO:36), HUMHPA1B_PEA_{—}1_T7 (SEQ ID NO:37), HUMHPA1B_PEA_{—}1_T12 (SEQ ID NO:38), HUMHPA1B_PEA_{—}1_T16 (SEQ ID NO:39), HUMHPA1B_PEA_{—}1_T19 (SEQ ID NO:40), HUMHPA1B_PEA_{—}1_T20 (SEQ ID NO:41), HUMHPA1B_PEA_{—}1_T27 (SEQ ID NO:42), HUMHPA1B_PEA_{—}1_T29 (SEQ ID NO:43), HUMHPA1B_PEA_{—}1_T55 (SEQ ID NO:44) and HUMHPA1B_PEA_{—}1_T56 (SEQ ID NO:45). Table 128 below describes the starting and ending position of this segment on each transcript.

TABLE 128
Segment location on transcripts

| | | |
|---|---|---|
| | Segment | |
| | starting | Segment |
| Transcript name | position | ending position |

| | | |
|---|---|---|
| HUMHPA1B_PEA_1_T1 (SEQ ID | 1079 | 1090 |
| NO: 34) | | |
| HUMHPA1B_PEA_1_T4 (SEQ ID | 2016 | 2027 |
| NO: 35) | | |
| HUMHPA1B_PEA_1_T6 (SEQ ID | 2014 | 2025 |
| NO: 36) | | |
| HUMHPA1B_PEA_1_T7 (SEQ ID | 2179 | 2190 |
| NO: 37) | | |
| HUMHPA1B_PEA_1_T12 (SEQ ID | 1079 | 1090 |
| NO: 38) | | |
| HUMHPA1B_PEA_1_T16 (SEQ ID | 987 | 998 |
| NO: 39) | | |
| HUMHPA1B_PEA_1_T19 (SEQ ID | 1136 | 1147 |
| NO: 40) | | |
| HUMHPA1B_PEA_1_T20 (SEQ ID | 935 | 946 |
| NO: 41) | | |
| HUMHPA1B_PEA_1_T27 (SEQ ID | 959 | 970 |
| NO: 42) | | |
| HUMHPA1B_PEA_1_T29 (SEQ ID | 810 | 821 |
| NO: 43) | | |
| HUMHPA1B_PEA_1_T55 (SEQ ID | 528 | 539 |
| NO: 44) | | |
| HUMHPA1B_PEA_1_T56 (SEQ ID | 571 | 582 |
| NO: 45) | | |

[0666] Segment cluster HUMHPA1B_PEA_{—}1_node_{—}87 (SEQ ID NO:130) according to the present invention is supported by 102 libraries. The number of libraries was determined as previously described. This segment can be found in the following transcript(s): HUMHPA1B_PEA_{—}1_T1 (SEQ ID NO:34), HUMHPA1B_PEA_{—}1_T4 (SEQ ID NO:35), HUMHPA1B_PEA_{—}1_T6 (SEQ ID NO:36), HUMHPA1B_PEA_{—}1_T7 (SEQ ID NO:37), HUMHPA1B_PEA_{—}1_T12 (SEQ ID NO:38, HUMHPA1B_PEA_{—}1_T16 (SEQ ID NO:39), HUMHPA1B_PEA_{—}1_T19 (SEQ ID NO:40), HUMHPA1B_PEA_{—}1_T20 (SEQ ID NO:41), HUMHPA1B_PEA_{—}1_T27 (SEQ ID NO:42), HUMHPA1B_PEA_{—}1_T29 (SEQ ID NO:43), HUMHPA1B_PEA_{—}1_T55 (SEQ ID NO:44) and HUMHPA1B_PEA_{—}1_T56 (SEQ ID NO:45 Table 129 below describes the starting and ending position of this segment on each transcript.

TABLE 129
Segment location on transcripts

| | Segment | |
|---|---|---|
| | starting | Segment |
| Transcript name | position | ending position |
| HUMHPA1B_PEA_1_T1 (SEQ ID | 1091 | 1154 |
| NO: 34) | | |
| HUMHPA1B_PEA_1_T4 (SEQ ID | 2028 | 2091 |
| NO: 35) | | |
| HUMHPA1B_PEA_1_T6 (SEQ ID | 2026 | 2089 |
| NO: 36) | | |
| HUMHPA1B_PEA_1_T7 (SEQ ID | 2191 | 2254 |
| NO: 37) | | |
| HUMHPA1B_PEA_1_T12 (SEQ ID | 1091 | 1154 |
| NO: 38) | | |
| HUMHPA1B_PEA_1_T16 (SEQ ID | 999 | 1062 |
| NO: 39) | | |
| HUMHPA1B_PEA_1_T19 (SEQ ID | 1148 | 1211 |
| NO: 40) | | |
| HUMHPA1B_PEA_1_T20 (SEQ ID | 947 | 1010 |
| NO: 41) | | |
| HUMHPA1B_PEA_1_T27 (SEQ ID | 971 | 1034 |
| NO: 42) | | |
| HUMHPA1B_PEA_1_T29 (SEQ ID | 822 | 885 |
| NO: 43) | | |
| HUMHPA1B_PEA_1_T55 (SEQ ID | 540 | 603 |
| NO: 44) | | |
| HUMHPA1B_PEA_1_T56 (SEQ ID | 583 | 646 |
| NO: 45) | | |

[0667] Variant protein alignment to the previously known protein:

| Sequence name: HPT_HUMAN | | | |
|---|---|---|---|
| Sequence documentation: | | | |
| Alignment of: HUMHPA1B_PEA_1_P61 (SEQ ID NO: 133) × HPT_HUMAN (SEQ ID NO: 131) .. | | | |
| Alignment segment 1/1: | | | |
| Quality: | 3336.00 | Escore: | 0 |
| Matching length: | 347 | Total length: | 406 |
| Matching Percent Similarity: | 100.00 | Matching Percent Identity: | 100.00 |
| Total Percent Similarity: | 85.47 | Total Percent Identity: | 85.47 |
| Gaps: | 1 | | |

| Alignment: | | |
|---|---|---|
| | . . . . . | |
| 1 | MSALGAVIALLLWGQLFAVDSGNDVTDI...................... | 28 |
| | \|\|\|\|\|\|\|\|\|\|\|\|\|\|\|\|\|\|\|\|\|\|\|\|\|\|\|\| | |
| 1 | MSALGAVIALLLWGQLFAVDSGNDVTDIADDGCPKPPEIAHGYVEHSVRY | 50 |
| | . . . . . | |
| 29 | .....................................ADDGCPKPPEIAH | 41 |
| | \|\|\|\|\|\|\|\|\|\|\|\|\| | |
| 51 | QCKNYYKLRTEGDGVYTLNDKKQWINKAVGDKLPECEADDGCPKPPEIAH | 100 |
| | . . . . . | |
| 42 | GYVEHSVRYQCKNYYKLRTEGDGVYTLNNEKQWINKAVGDKLPECEAVCG | 91 |
| | \|\|\|\|\|\|\|\|\|\|\|\|\|\|\|\|\|\|\|\|\|\|\|\|\|\|\|\|\|\|\|\|\|\|\|\|\|\|\|\|\|\|\|\|\|\|\|\|\|\| | |
| 101 | GYVEHSVRYQCKNYYKLRTEGDGVYTLNNEKQWINKAVGDKLPECEAVCG | 150 |
| | . . . . . | |
| 92 | KPKNPANPVQRILGGHLDAKGSFPWQAKMVSHHNLTTGATLINEQWLLTT | 141 |
| | \|\|\|\|\|\|\|\|\|\|\|\|\|\|\|\|\|\|\|\|\|\|\|\|\|\|\|\|\|\|\|\|\|\|\|\|\|\|\|\|\|\|\|\|\|\|\|\|\|\| | |
| 151 | KPKNPANPVQRILGGHLDAKGSFPWQAKMVSHHNLTTGATLINEQWLLTT | 200 |
| | . . . . . | |
| 142 | AKNLFLNHSENATAKDIAPTLTLYVGKKQLVEIEKVVLHPNYSQVDIGLI | 191 |
| | \|\|\|\|\|\|\|\|\|\|\|\|\|\|\|\|\|\|\|\|\|\|\|\|\|\|\|\|\|\|\|\|\|\|\|\|\|\|\|\|\|\|\|\|\|\|\|\|\|\| | |
| 201 | AKNLFLNHSENATAKDIAPTLTLYVGKKQLVEIEKVVLHPNYSQVDIGLI | 250 |
| | . . . . . | |
| 192 | KLKQKVSVNERVMPICLPSKDYAEVGRVGYVSGWGRNANFKFTDHLKYVM | 241 |
| | \|\|\|\|\|\|\|\|\|\|\|\|\|\|\|\|\|\|\|\|\|\|\|\|\|\|\|\|\|\|\|\|\|\|\|\|\|\|\|\|\|\|\|\|\|\|\|\|\|\| | |
| 251 | KLKQKVSVNERVMPICLPSKDYAEVGRVGYVSGWGRNANFKFTDHLKYVM | 300 |
| | . . . . . | |
| 242 | LPVADQDQCIRHYEGSTVPEKKTPKSPVGVQPILNEHTFCAGMSKYQEDT | 291 |
| | \|\|\|\|\|\|\|\|\|\|\|\|\|\|\|\|\|\|\|\|\|\|\|\|\|\|\|\|\|\|\|\|\|\|\|\|\|\|\|\|\|\|\|\|\|\|\|\|\|\| | |
| 301 | LPVADQDQCIRHYEGSTVPEKKTPKSPVGVQPILNEHTFCAGMSKYQEDT | 350 |
| | . . . . . | |
| 292 | CYGDAGSAFAVHDLEEDTWYATGILSFDKSCAVAEYGVYVKVTSIQDWVQ | 341 |
| | \|\|\|\|\|\|\|\|\|\|\|\|\|\|\|\|\|\|\|\|\|\|\|\|\|\|\|\|\|\|\|\|\|\|\|\|\|\|\|\|\|\|\|\|\|\|\|\|\|\| | |
| 351 | CYGDAGSAFAVHDLEEDTWYATGILSFDKSCAVAEYGVYVKVTSIQDWVQ | 400 |
| 342 | KTIAEN | 347 |
| | \|\|\|\|\|\| | |
| 401 | KTIAEN | 406 |

| Sequence name: HPT_HUMAN | | | |
|---|---|---|---|
| Sequence documentation: | | | |
| Alignment of: HUMHPA1B_PEA_1_P62 (SEQ ID NO: 134) × HPT_HUMAN (SEQ ID NO: 131) .. | | | |
| Alignment segment 1/1: | | | |
| Quality: | 630.00 | Escore: | 0 |
| Matching length: | 64 | Total length: | 64 |
| Matching Percent Similarity: | 100.00 | Matching Percent Identity: | 100.00 |
| Total Percent Similarity: | 100.00 | Total Percent Identity: | 100.00 |
| Gaps: | 0 | | |

| Alignment: | | |
|---|---|---|
| | . . . . . | |
| 1 | MSALGAVIALLLWGQLFAVDSGNDVTDIADDGCPKPPEIAHGYVEHSVRY | 50 |
| | \|\|\|\|\|\|\|\|\|\|\|\|\|\|\|\|\|\|\|\|\|\|\|\|\|\|\|\|\|\|\|\|\|\|\|\|\|\|\|\|\|\|\|\|\|\|\|\|\|\| | |
| 1 | MSALGAVIALLLWGQLFAVDSGNDVTDIADDGCPKPPEIAHGYVEHSVRY | 50 |
| | . | |
| 51 | QCKNYYKLRTEGDG | 64 |
| | \|\|\|\|\|\|\|\|\|\|\|\|\|\| | |
| 51 | QCKNYYKLRTEGDG | 64 |

| Sequence name: HPT_HUMAN | | | |
|---|---|---|---|
| Sequence documentation: | | | |
| Alignment of: HUMHPA1B_PEA_1_P64 (SEQ ID NO: 135) × HPT_HUMAN (SEQ ID NO: 131) .. | | | |
| Alignment segment 1/1: | | | |
| Quality: | 1236.00 | Escore: | 0 |
| Matching length: | 123 | Total length: | 123 |
| Matching Percent Similarity: | 100.00 | Matching Percent Identity: | 100.00 |
| Total Percent Similarity: | 100.00 | Total Percent Identity: | 100.00 |
| Gaps: | 0 | | |

| Alignment: | | |
|---|---|---|
| | . . . . . | |
| 1 | MSALGAVIALLLWGQLFAVDSGNDVTDIADDGCPKPPEIAHGYVEHSVRY | 50 |
| | \|\|\|\|\|\|\|\|\|\|\|\|\|\|\|\|\|\|\|\|\|\|\|\|\|\|\|\|\|\|\|\|\|\|\|\|\|\|\|\|\|\|\|\|\|\|\|\|\|\| | |
| 1 | MSALGAVIALLLWGQLFAVDSGNDVTDIADDGCPEPPEIAHGYVEHSVRY | 50 |
| | . . . . . | |
| 51 | QCKNYYKLRTEGDGVYTLNDKKQWINKAVGDKLPECEADDGCPKPPEIAH | 100 |
| | \|\|\|\|\|\|\|\|\|\|\|\|\|\|\|\|\|\|\|\|\|\|\|\|\|\|\|\|\|\|\|\|\|\|\|\|\|\|\|\|\|\|\|\|\|\|\|\|\|\| | |
| 51 | QCKNYYKLRTEGDGVYTLNDKKQWINKAVGDKLPECEADDGCPKPPEIAH | 100 |
| | . . | |
| 101 | GYVEHSVRYQCKNYYKLRTEGDG | 123 |
| | \|\|\|\|\|\|\|\|\|\|\|\|\|\|\|\|\|\|\|\|\|\|\| | |
| 101 | GYVEHSVRYQCKNYYKLRTEGDG | 123 |

| Sequence name: HPT_HUMAN (SEQ ID NO: 131) | | | |
|---|---|---|---|
| Sequence documentation: | | | |
| Alignment of: HUMHPA1B_PEA_1_P65 (SEQ ID NO: 136) × HPT_HUMAN (SEQ ID NO: 131) .. | | | |
| Alignment segment 1/1: | | | |
| Quality: | 1479.00 | Escore: | 0 |
| Matching length: | 147 | Total length: | 147 |
| Matching Percent Similarity: | 100.00 | Matching Percent Identity: | 100.00 |
| Total Percent Similarity: | 100.00 | Total Percent Identity: | 100.00 |
| Gaps: | 0 | | |

| Alignment: | | |
|---|---|---|
| | . . . . . | |
| 1 | MSALGAVIALLLWGQLFAVDSGNDVTDIADDGCPKPPEIAHGYVEHSVRY | 50 |
| | \|\|\|\|\|\|\|\|\|\|\|\|\|\|\|\|\|\|\|\|\|\|\|\|\|\|\|\|\|\|\|\|\|\|\|\|\|\|\|\|\|\|\|\|\|\|\|\|\|\| | |
| 1 | MSALGAVIALLLWGQLFAVDSGNDVTDIADDGCPKPPEIAHGYVEHSVRY | 50 |
| | . . . . . | |
| 51 | QCKNYYKLRTEGDGVYTLNDKKQWINKAVGDKLPECEADDGCPKPPEIAH | 100 |
| | \|\|\|\|\|\|\|\|\|\|\|\|\|\|\|\|\|\|\|\|\|\|\|\|\|\|\|\|\|\|\|\|\|\|\|\|\|\|\|\|\|\|\|\|\|\|\|\|\|\| | |
| 51 | QCKNYYKLRTEGDGVYTLNDKKQWINKAVGDKLPECEADDGCPKPPEIAH | 100 |
| | . . . . | |
| 101 | GYVEHSVRYQCKNYYKLRTEGDGVYTLNNEKQWINKAVGDKLPECEA | 147 |
| | \|\|\|\|\|\|\|\|\|\|\|\|\|\|\|\|\|\|\|\|\|\|\|\|\|\|\|\|\|\|\|\|\|\|\|\|\|\|\|\|\|\|\|\|\|\|\| | |
| 101 | GYVEHSVRYQCKNYYKLRTEGDGVYTLNNEKQWINKAVGDKLPECEA | 147 |

| Sequence name: HPT_HUMAN | | | |
|---|---|---|---|
| Sequence documentation: | | | |
| Alignment of: HUMHPA1B_PEA_1_P68 (SEQ ID NO: 137) × HPT_HUMAN (SEQ ID NO: 131) .. | | | |
| Alignment segment 1/1: | | | |
| Quality: | 3335.00 | Escore: | 0 |
| Matching length: | 347 | Total length: | 406 |
| Matching Percent Similarity: | 100.00 | Matching Percent Identity: | 100.00 |
| Total Percent Similarity: | 85.47 | Total Percent Identity: | 85.47 |
| Gaps: | 1 | | |

| Alignment: | | |
|---|---|---|
| | . . . . . | |
| 1 | MSALGAVIALLLWGQLFAVDSGNDVTDIADDGCPKPPEIAHGYVEHSVRY | 50 |
| | \|\|\|\|\|\|\|\|\|\|\|\|\|\|\|\|\|\|\|\|\|\|\|\|\|\|\|\|\|\|\|\|\|\|\|\|\|\|\|\|\|\|\|\|\|\|\|\|\|\| | |
| 1 | MSALGAVIALLLWGQLFAVDSGNDVTDIADDGCPKPPEIAHGYVEHSVRY | 50 |
| | . . . . . | |
| 51 | QCKNYYKLRTEGDGVYTLNDK............................. | 71 |
| | \|\|\|\|\|\|\|\|\|\|\|\|\|\|\|\|\|\|\|\|\| | |
| 51 | QCKNYYKLRTEGDGVYTLNDKKQWINKAVGDKLPECEADDGCPKPPEIAH | 100 |
| | . . . . . | |
| 72 | ..............................KQWINKAVGDKLPECEAVCG | 91 |
| | \|\|\|\|\|\|\|\|\|\|\|\|\|\|\|\|\|\|\|\| | |
| 101 | GYVEHSVRYQCKNYYKLRTEGDGVYTLNNEKQWINKAVGDKLPECEAVCG | 150 |
| | . . . . . | |
| 92 | KPKNPANPVQRILGGHLDAKGSFPWQAKMVSHHNLTTGATLINEQWLLTT | 141 |
| | \|\|\|\|\|\|\|\|\|\|\|\|\|\|\|\|\|\|\|\|\|\|\|\|\|\|\|\|\|\|\|\|\|\|\|\|\|\|\|\|\|\|\|\|\|\|\|\|\|\| | |
| 151 | KPKNPANPVQRILGGHLDAKGSFPWQAKMVSHHNLTTGATLINEQWLLTT | 200 |
| | . . . . . | |
| 142 | AKNLFLNHSENATAKDIAPTLTLYVGKKQLVEIEKVVLHPNYSQVDIGLI | 191 |
| | \|\|\|\|\|\|\|\|\|\|\|\|\|\|\|\|\|\|\|\|\|\|\|\|\|\|\|\|\|\|\|\|\|\|\|\|\|\|\|\|\|\|\|\|\|\|\|\|\|\| | |
| 201 | AKNLFLNHSENATAKDIAPTLTLYVGKKQLVEIEKVVLHPNYSQVDIGLI | 250 |
| | . . . . . | |
| 192 | KLKQKVSVNERVMPICLPSKDYAEVGRVGYVSGWGRNANFKFTDHLKYVM | 241 |
| | \|\|\|\|\|\|\|\|\|\|\|\|\|\|\|\|\|\|\|\|\|\|\|\|\|\|\|\|\|\|\|\|\|\|\|\|\|\|\|\|\|\|\|\|\|\|\|\|\|\| | |
| 251 | KLKQKVSVNERVMPICLPSKDYAEVGRVGYVSGWGRNANFKFTDHLKYVM | 300 |
| | . . . . . | |
| 242 | LPVADQDQCIRHYEGSTVPEKKTPKSPVGVQPILNEHTFCAGMSKYQEDT | 291 |
| | \|\|\|\|\|\|\|\|\|\|\|\|\|\|\|\|\|\|\|\|\|\|\|\|\|\|\|\|\|\|\|\|\|\|\|\|\|\|\|\|\|\|\|\|\|\|\|\|\|\| | |
| 301 | LPVADQDQCIRHYEGSTVPEKKTPKSPVGVQPILNEHTFCAGMSKYQEDT | 350 |
| | . . . . . | |
| 292 | CYGDAGSAFAVHDLEEDTWYATGILSFDKSCAVAEYGVYVKVTSIQDWVQ | 341 |
| | \|\|\|\|\|\|\|\|\|\|\|\|\|\|\|\|\|\|\|\|\|\|\|\|\|\|\|\|\|\|\|\|\|\|\|\|\|\|\|\|\|\|\|\|\|\|\|\|\|\| | |
| 351 | CYGDAGSAFAVHDLEEDTWYATGILSFDKSCAVAEYGVYVKVTSIQDWVQ | 400 |
| 342 | KTIAEN | 347 |
| | \|\|\|\|\|\| | |
| 401 | KTIAEN | 406 |

| Sequence name: HPT_HUMAN (SEQ ID NO: 131) | | | |
|---|---|---|---|
| Sequence documentation: | | | |
| Alignment of: HUMHPA1B_PEA_1_P72 (SEQ ID NO: 138) × HPT_HUMAN (SEQ ID NO: 131) | | | |
| .. | | | |
| Alignment segment 1/1: | | | |
| Quality: | 621.00 | Escore: | 0 |
| Matching length: | 63 | Total length: | 63 |
| Matching Percent Similarity: | 100.00 | Matching Percent Identity: | 100.00 |
| Total Percent Similarity: | 100.00 | Total Percent Identity: | 100.00 |
| Gaps: | 0 | | |

| Alignment: | | |
|---|---|---|
| | . . . . . | |
| 1 | MSALGAVIALLLWGQLFAVDSGNDVTDIADDGCPKPPEIAHGYVEHSVRY | 50 |
| | \|\|\|\|\|\|\|\|\|\|\|\|\|\|\|\|\|\|\|\|\|\|\|\|\|\|\|\|\|\|\|\|\|\|\|\|\|\|\|\|\|\|\|\|\|\|\|\|\|\| | |
| 1 | MSALGAVIALLLWGQLFAVDSGNDVTDIADDGCPKPPEIAHGYVEHSVRY | 50 |
| | . | |
| 51 | QCKNYYKLRTEGD | 63 |
| | \|\|\|\|\|\|\|\|\|\|\|\|\| | |
| 51 | QCKNYYKLRTEGD | 63 |

| Sequence name: HPT_HUMAN | | | |
|---|---|---|---|
| Sequence documentation: | | | |
| Alignment of: HUMHPA1B_PEA_1_P75 (SEQ ID NO: 139) × HPT_HUMAN (SEQ ID NO: 131) | | | |
| .. | | | |
| Alignment segment 1/1: | | | |
| Quality: | 3534.00 | Escore: | 0 |
| Matching length: | 366 | Total length: | 406 |
| Matching Percent Similarity: | 100.00 | Matching Percent Identity: | 100.00 |
| Total Percent Similarity: | 90.15 | Total Percent Identity: | 90.15 |
| Gaps: | 1 | | |

| Alignment: | | |
|---|---|---|
| | . . . . . | |
| 1 | MSALGAVIALLLWGQLFAVDSGNDVTDIADDGCPKPPEIAHGYVEHSVRY | 50 |
| | \|\|\|\|\|\|\|\|\|\|\|\|\|\|\|\|\|\|\|\|\|\|\|\|\|\|\|\|\|\|\|\|\|\|\|\|\|\|\|\|\|\|\|\|\|\|\|\|\|\| | |
| 1 | MSALGAVIALLLWGQLFAVDSGNDVTDIADDGCPKPPEIAHGYVEHSVRY | 50 |
| | . . . . . | |
| 51 | QCKNYYKLRTEGDGVYTLNDKKQWINKAVGDKLPECEADDGCPKPPEIAH | 100 |
| | \|\|\|\|\|\|\|\|\|\|\|\|\|\|\|\|\|\|\|\|\|\|\|\|\|\|\|\|\|\|\|\|\|\|\|\|\|\|\|\|\|\|\|\|\|\|\|\|\|\| | |
| 51 | QCKNYYKLRTEGDGVYTLNDKKQWINKAVGDKLPECEADDGCPKPPEIAH | 100 |
| | . . . . . | |
| 101 | GYVEHSVRYQCKNYYKLRTEGDGVYTLNNEKQWINKAVGDKLPECEA... | 147 |
| | \|\|\|\|\|\|\|\|\|\|\|\|\|\|\|\|\|\|\|\|\|\|\|\|\|\|\|\|\|\|\|\|\|\|\|\|\|\|\|\|\|\|\|\|\|\|\|\|\|\| | |
| 101 | GYVEHSVRYQCKNYYKLRTEGDGVYTLNNEKQWINKAVGDKLPECEAVCG | 150 |
| | . . . . . | |
| 148 | .....................................GATLINEQWLLTT | 160 |
| | \|\|\|\|\|\|\|\|\|\|\|\|\| | |
| 151 | KPKNPANPVQRILGGHLDAKGSFPWQAKMVSHHNLTTGATLINEQWLLTT | 200 |
| | . . . . . | |
| 161 | AKNLFLNHSENATAKDIAPTLTLYVGKKQLVEIEKVVLHPNYSQVDIGLI | 210 |
| | \|\|\|\|\|\|\|\|\|\|\|\|\|\|\|\|\|\|\|\|\|\|\|\|\|\|\|\|\|\|\|\|\|\|\|\|\|\|\|\|\|\|\|\|\|\|\|\|\|\| | |
| 201 | AKNLFLNHSENATAKDIAPTLTLYVGRKQLVEIEKVVLHPNYSQVDIGLI | 250 |
| | . . . . . | |
| 211 | KLKQKVSVNERVMPICLPSKDYAEVGRVGYVSGWGRNANFKFTDHLKYVM | 260 |
| | \|\|\|\|\|\|\|\|\|\|\|\|\|\|\|\|\|\|\|\|\|\|\|\|\|\|\|\|\|\|\|\|\|\|\|\|\|\|\|\|\|\|\|\|\|\|\|\|\|\| | |
| 251 | KLKQKVSVNERVMPICLPSKDYAEVGRVGYVSGWGRNANFKFTDHLKYVM | 300 |
| | . . . . . | |
| 261 | LPVADQDQCIRHYEGSTVPEKKTPKSPVGVQPILNEHTFCAGMSKYQEDT | 310 |
| | \|\|\|\|\|\|\|\|\|\|\|\|\|\|\|\|\|\|\|\|\|\|\|\|\|\|\|\|\|\|\|\|\|\|\|\|\|\|\|\|\|\|\|\|\|\|\|\|\|\| | |
| 301 | LPVADQDQCIRHYEGSTVPEKKTPKSPVGVQPILNEHTFCAGMSKYQEDT | 350 |
| | . . . . . | |
| 311 | CYGDAGSAFAVHDLEEDTWYATGILSFDKSCAVAEYGVYVKVTSIQDWVQ | 360 |
| | \|\|\|\|\|\|\|\|\|\|\|\|\|\|\|\|\|\|\|\|\|\|\|\|\|\|\|\|\|\|\|\|\|\|\|\|\|\|\|\|\|\|\|\|\|\|\|\|\|\| | |
| 351 | CYGDAGSAFAVHDLEEDTWYATGILSFDKSCAVAEYGVYVKVTSIQDWVQ | 400 |
| 361 | KTIAEN | 366 |
| | \|\|\|\|\|\| | |
| 401 | KTIAEN | 406 |

| Sequence name: HPT_HUMAN (SEQ ID NO: 131) | | | |
|---|---|---|---|
| Sequence documentation: | | | |
| Alignment of: HUMHPA1B_PEA_1_P76 (SEQ ID NO: 140) × HPT_HUMAN (SEQ ID NO: 131) | | | |
| .. | | | |
| Alignment segment 1/1: | | | |
| Quality: | 2834.00 | Escore: | 0 |
| Matching length: | 299 | Total length: | 406 |
| Matching Percent Similarity: | 100.00 | Matching Percent Identity: | 99.67 |
| Total Percent Similarity: | 73.65 | Total Percent Identity: | 73.40 |
| Gaps: | 1 | | |

| Alignment: | | |
|---|---|---|
| | . . . . . | |
| 1 | MSALGAVIALLLWGQLFAVDSGNDVTDIADDGCPKPPEIAHGYVEHSVRY | 50 |
| | \|\|\|\|\|\|\|\|\|\|\|\|\|\|\|\|\|\|\|\|\|\|\|\|\|\|\|\|\|\|\|\|\|\|\|\|\|\|\|\|\|\|\|\|\|\|\|\|\|\| | |
| 1 | MSALGAVIALLLWGQLFAVDSGNDVTDIADDGCPKPPEIAHGYVEHSVRY | 50 |
| | . . . . . | |
| 51 | Q................................................. | 51 |
| | \| | |
| 51 | QCKNYYKLRTEGDGVYTLNDKKQWINKAVGDKLPECEADDGCPKPPEIAH | 100 |
| | . . . . . | |
| 51 | .................................................. | 51 |
| 101 | GYVEHSVRYQCKNYYKLRTEGDGVYTLNNEKQWINKAVGDKLPECEAVCG | 150 |
| | . . . . . | |
| 52 | ........LQRILGGHLDAKGSFPWQAKMVSHHNLTTGATLINEQWLLTT | 93 |
| | :\|\|\|\|\|\|\|\|\|\|\|\|\|\|\|\|\|\|\|\|\|\|\|\|\|\|\|\|\|\|\|\|\|\|\|\|\|\|\|\|\| | |
| 151 | KPKNPANPVQRILGGHLDAKGSFPWQAKMVSHHNLTTGATLINEQWLLTT | 200 |
| | . . . . . | |
| 94 | AKNLFLNHSENATAKDIAPTLTLYVGKKQLVEIEKVVLHPNYSQVDIGLI | 143 |
| | \|\|\|\|\|\|\|\|\|\|\|\|\|\|\|\|\|\|\|\|\|\|\|\|\|\|\|\|\|\|\|\|\|\|\|\|\|\|\|\|\|\|\|\|\|\|\|\|\|\| | |
| 201 | AKNLFLNHSENATAKDIAPTLTLYVGKKQLVEIEKVVLHPNYSQVDIGLI | 250 |
| | . . . . . | |
| 144 | KLKQKVSVNERVMPICLPSKDYAEVGRVGYVSGWGRNANFKFTDHLKYVM | 193 |
| | \|\|\|\|\|\|\|\|\|\|\|\|\|\|\|\|\|\|\|\|\|\|\|\|\|\|\|\|\|\|\|\|\|\|\|\|\|\|\|\|\|\|\|\|\|\|\|\|\|\| | |
| 251 | KLKQKVSVNERVMPICLPSKDYAEVGRVGYVSGWGRNANFKFTDHLKYVM | 300 |
| | . . . . . | |
| 194 | LPVADQDQCIRHYEGSTVPEKKTPKSPVGVQPILNEHTFCAGMSKYQEDT | 243 |
| | \|\|\|\|\|\|\|\|\|\|\|\|\|\|\|\|\|\|\|\|\|\|\|\|\|\|\|\|\|\|\|\|\|\|\|\|\|\|\|\|\|\|\|\|\|\|\|\|\|\| | |
| 301 | LPVADQDQCIRHYEGSTVPEKKTPKSPVGVQPILNEHTFCAGMSKYQEDT | 350 |
| | . . . . . | |
| 244 | CYGDAGSAFAVHDLEEDTWYATGILSFDKSCAVAEYGVYVKVTSIQDWVQ | 293 |
| | \|\|\|\|\|\|\|\|\|\|\|\|\|\|\|\|\|\|\|\|\|\|\|\|\|\|\|\|\|\|\|\|\|\|\|\|\|\|\|\|\|\|\|\|\|\|\|\|\|\| | |
| 351 | CYGDAGSAFAVHDLEEDTWYATGILSFDKSCAVAEYGVYVKVTSIQDWVQ | 400 |
| 294 | KTIAEN | 299 |
| | \|\|\|\|\|\| | |
| 401 | KTIAEN | 406 |

| Sequence name: HPT_HUMAN | | | |
|---|---|---|---|
| Sequence documentation: | | | |
| Alignment of: HUMHPA1B_PEA_1_P81 (SEQ ID NO: 141) × HPT HUMAN (SEQ ID NO: 131) | | | |
| .. | | | |
| Alignment segment 1/1: | | | |
| Quality: | 2927.00 | Escore: | 0 |
| Matching length: | 307 | Total length: | 406 |
| Matching Percent Similarity: | 100.00 | Matching Percent Identity: | 100.00 |
| Total Percent Similarity: | 75.62 | Total Percent Identity: | 75.62 |
| Gaps: | 1 | | |

| Alignment: | | |
|---|---|---|
| | . . . . . | |
| 1 | MSALGAVIALLLWGQLFAVDSGNDVTDIADDGCPKPPEIAHGYVEHSVRY | 50 |
| | \|\|\|\|\|\|\|\|\|\|\|\|\|\|\|\|\|\|\|\|\|\|\|\|\|\|\|\|\|\|\|\|\|\|\|\|\|\|\|\|\|\|\|\|\|\|\|\|\|\| | |
| 1 | MSALGAVIALLLWGQLFAVDSGNDVTDIADDGCPKPPEIAHGYVEHSVRY | 50 |
| | . . . . . | |
| 51 | QCKNYYKLRTEGDGVYTLNDKKQWINKAVGDKLPECEA............ | 88 |
| | \|\|\|\|\|\|\|\|\|\|\|\|\|\|\|\|\|\|\|\|\|\|\|\|\|\|\|\|\|\|\|\|\|\|\|\|\|\| | |
| 51 | QCKNYYKLRTEGDGVYTLNDKKQWINKAVGDKLPECEADDGCPKPPEIAH | 100 |
| | . . . . . | |
| 88 | .................................................. | 88 |
| 101 | GYVEHSVRYQCKNYYKLRTEGDGVYTLNNEKQWINKAVGDKLPECEAVCG | 150 |
| | . . . . . | |
| 89 | .....................................GATLINEQWLLTT | 101 |
| | \|\|\|\|\|\|\|\|\|\|\|\|\| | |
| 151 | KPKNPANPVQRILGGHLDAKGSFPWQAKMVSHHNLTTGATLINEQWLLTT | 200 |
| | . . . . . | |
| 102 | AKNLFLNHSENATAKDIAPTLTLYVGKKQLVEIEKVVLHPNYSQVDIGLI | 151 |
| | \|\|\|\|\|\|\|\|\|\|\|\|\|\|\|\|\|\|\|\|\|\|\|\|\|\|\|\|\|\|\|\|\|\|\|\|\|\|\|\|\|\|\|\|\|\|\|\|\|\| | |
| 201 | AKNLFLNHSENATAKDIAPTLTLYVGKKQLVEIEKVVLHPNYSQVDIGLI | 250 |
| | . . . . . | |
| 152 | KLKQKVSVNERVMPICLPSKDYAEVGRVGYVSGWGRNANFKFTDHLKYVM | 201 |
| | \|\|\|\|\|\|\|\|\|\|\|\|\|\|\|\|\|\|\|\|\|\|\|\|\|\|\|\|\|\|\|\|\|\|\|\|\|\|\|\|\|\|\|\|\|\|\|\|\|\| | |
| 251 | KLKQKVSVNERVMPICLPSKDYAEVGRVGYVSGWGRNANFKFTDHLKYVM | 300 |
| | . . . . . | |
| 202 | LPVADQDQCIRHYEGSTVPEKKTPKSPVGVQPILNEHTFCAGMSKYQEDT | 251 |
| | \|\|\|\|\|\|\|\|\|\|\|\|\|\|\|\|\|\|\|\|\|\|\|\|\|\|\|\|\|\|\|\|\|\|\|\|\|\|\|\|\|\|\|\|\|\|\|\|\|\| | |
| 301 | LPVADQDQCIRHYEGSTVPEKKTPKSPVGVQPILNEHTFCAGMSKYQEDT | 350 |
| | . . . . . | |
| 252 | CYGDAGSAFAVHDLEEDTWYATGILSFDKSCAVAEYGVYVKVTSIQDWVQ | 301 |
| | \|\|\|\|\|\|\|\|\|\|\|\|\|\|\|\|\|\|\|\|\|\|\|\|\|\|\|\|\|\|\|\|\|\|\|\|\|\|\|\|\|\|\|\|\|\|\|\|\|\| | |
| 351 | CYGDAGSAFAVHDLEEDTWYATGILSFDKSCAVAEYGVYVKVTSIQDWVQ | 400 |
| 302 | KTIAEN | 307 |
| | \|\|\|\|\|\| | |
| 401 | KTIAEN | 406 |

| Sequence name: HPT_HUMAN (SEQ ID NO: 131) | | | |
|---|---|---|---|
| Sequence documentation: | | | |
| Alignment of: HUMHPA1B_PEA_1_P83 (SEQ ID NO: 142) × HPT_HUMAN (SEQ ID NO: 131) | | | |
| .. | | | |
| Alignment segment 1/1: | | | |
| Quality: | 276.00 | Escore: | 0 |
| Matching length: | 30 | Total length: | 30 |
| Matching Percent Similarity: | 100.00 | Matching Percent Identity: | 100.00 |
| Total Percent Similarity: | 100.00 | Total Percent Identity: | 100.00 |
| Gaps: | 0 | | |

| Alignment: | | |
|---|---|---|
| | . . . | |
| 1 | MSALGAVIALLLWGQLFAVDSGNDVTDIAD | 30 |
| | \|\|\|\|\|\|\|\|\|\|\|\|\|\|\|\|\|\|\|\|\|\|\|\|\|\|\|\|\|\| | |
| 1 | MSALGAVIALLLWGQLFAVDSGNDVTDIAD | 30 |

| Sequence name: HPT_HUMAN_V1 (SEQ ID NO: 132) | | | |
|---|---|---|---|
| Sequence documentation: | | | |
| Alignment of: HUMHPA1B_PEA_1_P106 (SEQ ID NO: 143) × HPT_HUMAN_V1 (SEQ ID NO: 132) .. | | | |
| Alignment segment 1/1: | | | |
| Quality: | 863.00 | Escore: | 0 |
| Matching length: | 88 | Total length: | 88 |
| Matching Percent Similarity: | 100.00 | Matching Percent Identity: | 98.86 |
| Total Percent Similarity: | 100.00 | Total Percent Identity: | 98.86 |
| Gaps: | 0 | | |

| Alignment: | | |
|---|---|---|
| | . . . . . | |
| 1 | MSALGAVIALLLWGQLFAVDSGNDVTDIADDGCPKPPEIAHGYVEHSVRY | 50 |
| | \|\|\|\|\|\|\|\|\|\|\|\|\|\|\|\|\|\|\|\|\|\|\|\|\|\|\|\|\|\|\|\|\|\|\|\|\|\|\|\|\|\|\|\|\|\|\|\|\|\| | |
| 1 | MSALGAVIALLLWGQLFAVDSGNDVTDIADDGCPKPPEIAHGYVEHSVRY | 50 |
| | . . . | |
| 51 | QCKNYYELRTEGDGVYTLNNEKQWINKAVGDKLPECEA | 88 |
| | \|\|\|\|\|\|\|\|\|\|\|\|\|\|\|\|\|\|\|\|\|\|\|\|\|\|\|\|\|\|\|\|\|\|\|\|\|\| | |
| 51 | QCKNYYKLRTEGDGVYTLNNKKQWINKAVGDKLPECEA | 88 |

| Sequence name: HPT_HUMAN (SEQ ID NO: 131) | | | |
|---|---|---|---|
| Sequence documentation: | | | |
| Alignment of: HUMHPA1B_PEA_1_P107 (SEQ ID NO: 144) × HPT_HUMAN (SEQ ID NO: 131) | | | |
| .. | | | |
| Alignment segment 1/1: | | | |
| Quality: | 1181.00 | Escore: | 0 |
| Matching length: | 128 | Total length: | 187 |
| Matching Percent Similarity: | 100.00 | Matching Percent Identity: | 100.00 |
| Total Percent Similarity: | 68.45 | Total Percent Identity: | 68.45 |
| Gaps: | 1 | | |

| Alignment: | | |
|---|---|---|
| | . . . . . | |
| 1 | MSALGAVIALLLWGQLFAVDSGNDVTDI...................... | 28 |
| | \|\|\|\|\|\|\|\|\|\|\|\|\|\|\|\|\|\|\|\|\|\|\|\|\|\|\|\| | |
| 1 | MSALGAVIALLLWGQLFAVDSGNDVTDIADDGCPKPPEIAHGYVEHSVRY | 50 |
| | . . . . . | |
| 29 | .....................................ADDGCPKPPEIAH | 41 |
| | \|\|\|\|\|\|\|\|\|\|\|\|\| | |
| 51 | QCKNYYKLRTEGDGVYTLNDKKQWINKAVGDKLPECEADDGCPKPPEIAH | 100 |
| | . . . . . | |
| 42 | GYVEHSVRYQCKNYYKLRTEGDGVYTLNNEKQWINKAVGDKLPECEAVCG | 91 |
| | \|\|\|\|\|\|\|\|\|\|\|\|\|\|\|\|\|\|\|\|\|\|\|\|\|\|\|\|\|\|\|\|\|\|\|\|\|\|\|\|\|\|\|\|\|\|\|\|\|\| | |
| 101 | GYVEHSVRYQCKNYYKLRTEGDGVYTLNNEKQWINKAVGDKLPECEAVCG | 150 |
| | . . . | |
| 92 | KPKNPANPVQRILGGHLDAKGSFPWQAKMVSHHNLTT | 128 |
| | \|\|\|\|\|\|\|\|\|\|\|\|\|\|\|\|\|\|\|\|\|\|\|\|\|\|\|\|\|\|\|\|\|\|\|\|\| | |
| 151 | KPKNPANPVQRILGGHLDAKGSFPWQAKMVSHHNLTT | 187 |

| Sequence name: HPT_HUMAN (SEQ ID NO: 131) | | | |
|---|---|---|---|
| Sequence documentation: | | | |
| Alignment of: HUMHPA1B_PEA_1_P115 (SEQ ID NO: 145)) × HPT_HUMAN (SEQ ID NO: 131) | | | |
| .. | | | |
| Alignment segment 1/1: | | | |
| Quality: | 872.00 | Escore: | 0 |
| Matching length: | 88 | Total length: | 88 |
| Matching Percent Similarity: | 100.00 | Matching Percent Identity: | 100.00 |
| Total Percent Similarity: | 100.00 | Total Percent Identity: | 100.00 |
| Gaps: | 0 | | |

| Alignment: | | |
|---|---|---|
| | . . . . . | |
| 1 | MSALGAVIALLLWGQLFAVDSGNDVTDIADDGCPKPPEIAHGYVEHSVRY | 50 |
| | \|\|\|\|\|\|\|\|\|\|\|\|\|\|\|\|\|\|\|\|\|\|\|\|\|\|\|\|\|\|\|\|\|\|\|\|\|\|\|\|\|\|\|\|\|\|\|\|\|\| | |
| 1 | MSALGAVIALLLWGQLFAVDSGNDVTDIADDGCPKPPEIAHGYVEHSVRY | 50 |
| | . . . | |
| 51 | QCKNYYKLRTEGDGVYTLNDKKQWINKAVGDKLPECEA | 88 |
| | \|\|\|\|\|\|\|\|\|\|\|\|\|\|\|\|\|\|\|\|\|\|\|\|\|\|\|\|\|\|\|\|\|\|\|\|\|\| | |
| 51 | QCKNYYKLRTEGDGVYTLNDKKQWINKAVGDKLPECEA | 88 |

### Description for Cluster HSHGFR

[0668] Cluster HSHGFR features 5 transcript(s) and 13 segment(s) of interest, the names for which are given in Tables 1 and 2, respectively, the sequences themselves are given at the end of the application. The selected protein variants are given in table 3.

TABLE 1
Transcripts of interest

| Transcript Name | Sequence ID No. |
|---|---|
| HSHGFR_T1 | 146 |
| HSHGFR_T6 | 147 |
| HSHGFR_T8 | 148 |
| HSHGFR_T13 | 149 |
| HSHGFR_T14 | 150 |

[0669] TABLE 2
Segments of interest

| Segment Name | Sequence ID No. |
|---|---|
| HSHGFR_node_2 | 151 |
| HSHGFR_node_3 | 152 |
| HSHGFR_node_6 | 153 |
| HSHGFR_node_11 | 154 |
| HSHGFR_node_15 | 155 |
| HSHGFR_node_16 | 156 |
| HSHGFR_node_18 | 157 |
| HSHGFR_node_22 | 158 |
| HSHGFR_node_24 | 159 |
| HSHGFR_node_8 | 160 |
| HSHGFR_node_10 | 161 |
| HSHGFR_node_14 | 162 |
| HSHGFR_node_20 | 163 |

[0670] TABLE 3
Proteins of interest

| Protein Name | Sequence ID No. | Corresponding Transcript(s) |
|---|---|---|
| HSHGFR_P6 | 165 | HSHGFR_T6 (SEQ ID |
| | | NO: 147); HSHGFR_T8 (SEQ |
| | | ID NO: 148) |
| HSHGFR_P11 | 166 | HSHGFR_T13 (SEQ ID |
| | | NO: 149) |
| HSHGFR_P12 | 167 | HSHGFR_T14 (SEQ ID |
| | | NO: 150) |
| HSHGFR_P13 | 168 | HSHGFR_T1 (SEQ ID |
| | | NO: 146) |

[0671] These sequences are variants of the known protein Hepatocyte growth factor precursor (SEQ ID NO:164) (SwissProt accession identifier HGF_HUMAN; known also according to the synonyms Scatter factor; SF; Hepatopoeitin A), referred to herein as the previously known protein.

[0672] Protein Hepatocyte growth factor precursor (SEQ ID NO:164) is known or believed to have the following function(s): HGF is a potent mitogen for mature parenchymal hepatocyte cells, seems to be an hepatotrophic factor, and acts as growth factor for a broad spectrum of tissues and cell types. It has no detectable protease activity. The sequence for protein Hepatocyte growth factor precursor is given at the end of the application, as “Hepatocyte growth factor precursor amino acid sequence” (SEQ ID NO:164). Known polymorphisms for this sequence are as shown in Table 4.

TABLE 4
Amino acid mutations for Known Protein

| SNP position(s) on | |
|---|---|
| amino acid sequence | Comment |
| 153 | S -> I (in dbSNP: 17566). /FTId = VAR_014570. |
| 32-33 | QR -> HK |
| 78 | K -> N |
| 162-166 | Missing |
| 180 | P -> T |
| 293 | M -> V |
| 300 | L -> M |
| 317 | V -> A |
| 336 | E -> K |
| 387 | H -> N |
| 416 | D -> N |
| 505 | I -> V |
| 509 | V -> I |
| 558 | D -> E |
| 561 | C -> R |
| 592 | D -> N |
| 595 | S -> N |

[0673] The previously known protein also has the following indication(s) and/or potential therapeutic use(s): Cancer; Hepatic dysfunction; Buerger's syndrome. It has been investigated for clinical/therapeutic use in humans, for example as a target for an antibody or small molecule, and/or as a direct therapeutic; available information related to these investigations is as follows. Potential pharmaceutically related or therapeutically related activity or activities of the previously known protein are as follows: Angiogenesis inhibitor; Hepatocyte growth factor modulator. A therapeutic role for a protein represented by the cluster has been predicted. The cluster was assigned this field because there was information in the drug database or the public databases (e.g., described herein above) that this protein, or part thereof, is used or can be used for a potential therapeutic indication: Hepatoprotective; Hormone; Radio/chemoprotective; Anticancer; Cardiovascular; Hypolipaemic/Antiatherosclerosis.

[0674] The following GO Annotation(s) apply to the previously known protein. The following annotation(s) were found: proteolysis and peptidolysis; mitosis, which are annotation(s) related to Biological Process; and chymotrypsin; trypsin; growth factor, which are annotation(s) related to Molecular Function.

[0675] The GO assignment relies on information from one or more of the SwissProt/TremBl Protein knowledgebase, available from <http://www.expasy.ch/sprot/>; or Locuslink, available from <http://www.ncbi.nlm.nih.gov/projects/LocusLink/>.

[0676] It was found that concentrations of the known protein in the peritoneal fluid of patients with endometriosis were significantly higher than in those without endometriosis and correlated positively with revised American Society of Reproductive Medicine scores (Yoshida et al, J Clin Endocrinol Metab. 2004 February; 89(2):823-32). Variants of this cluster are suitable as diagnostic markers for endometriosis.

[0677] As noted above, cluster HSHGFR features 5 transcript(s), which were listed in Table 1 above. These transcript(s) encode for protein(s) which are variant(s) of protein Hepatocyte growth factor precursor (SEQ ID NO:164). A description of each variant protein according to the present invention is now provided.

[0678] Variant protein HSHGFR_P6 (SEQ ID NO:165) according to the present invention has an amino acid sequence as given at the end of the application; it is encoded by transcript(s) HSHGFR_T6 (SEQ ID NO:147) and HSHGFR_T8 (SEQ ID NO:148). An alignment is given to the known protein (Hepatocyte growth factor precursor (SEQ ID NO:164)) at the end of the application. One or more alignments to one or more previously published protein sequences are given at the end of the application. A brief description of the relationship of the variant protein according to the present invention to each such aligned protein is as follows:

[0679] Comparison report between HSHGFR_P6 (SEQ ID NO:165) and HGF_HUMAN (SEQ ID NO:164):

[0680] 1. An isolated chimeric polypeptide encoding for HSHGFR_P6 (SEQ ID NO:165), comprising a first amino acid sequence being at least 90% homologous to MWVTKLLPALLLQHVLLHLLLLPIAIPYAEGQRKRRNTIHEFKKSAKTTLIKIDPALKIKT KKVNTADQCANRCTRNKGLPFTCKAFVFDKARKQCLWFPFNSMSSGVKKEFGHEFDL YENKDYIRNCIIGKGRSYKGTVSITKSGIKCQPWSSMIPHEHSFLPSSYRGKDLQENYCR NPRGEEGGPWCFTSNPEVRYEVCDIPQCSEVECMTCNGESYRGLMDHTESGKICQRWD HQTPHRHKFLPERYPDKGFDDNYCRNPDGQPRPWCYTLDPHTRWEYCAIKTCA corresponding to amino acids 1-289 of HGF_HUMAN) (SEQ ID NO:164), which also corresponds to amino acids 1-289 of HSHGFR_P6 (SEQ ID NO:165), and a second amino acid sequence being at least 70%, optionally at least 80%, preferably at least 85%, more preferably at least 90% and most preferably at least 95% homologous to a polypeptide having the sequence E corresponding to amino acids 290-290 of HSHGFR_P6 (SEQ ID NO:165), wherein said first amino acid sequence and second amino acid sequence are contiguous and in a sequential order.

[0681] The location of the variant protein was determined according to results from a number of different software programs and analyses, including analyses from SignalP and other specialized programs. The variant protein is believed to be located as follows with regard to the cell: secreted. The protein localization is believed to be secreted because both signal-peptide prediction programs predict that this protein has a signal peptide, and neither trans-membrane region prediction program predicts that this protein has a trans-membrane region.

[0682] Variant protein HSHGFR_P6 (SEQ ID NO:165) also has the following non-silent SNPs (Single Nucleotide Polymorphisms) as listed in Table 5, (given according to their position(s) on the amino acid sequence, with the alternative amino acid(s) listed; the last column indicates whether the SNP is known or not; the presence of known SNPs in variant protein HSHGFR_P6 (SEQ ID NO:165) Sequence provides support for the deduced sequence of this variant protein according to the present invention).

TABLE 5
Amino acid mutations

| SNP position(s) on amino acid | Alternative | |
|---|---|---|
| sequence | amino acid(s) | Previously known SNP? |
| 53 | I -> V | No |
| 58 | K -> R | No |
| 73 | R -> G | No |
| 90 | D -> G | No |
| 94 | K -> E | No |
| 118 | L -> P | No |
| 126 | R -> G | No |
| 162 | F -> L | No |
| 167 | Y -> C | No |
| 210 | E -> G | No |
| 232 | C -> R | No |
| 236 | D -> G | No |
| 244 | K -> | No |
| 250 | Y -> H | No |
| 258 | N -> D | No |

[0683] The glycosylation sites of variant protein HSHGFR_P6 (SEQ ID NO:165), as compared to the known protein Hepatocyte growth factor precursor (SEQ ID NO:164), are described in Table 6 (given according to their position(s) on the amino acid sequence in the first column; the second column indicates whether the glycosylation site is present in the variant protein; and the last column indicates whether the position is different on the variant protein).

TABLE 6
Glycosylation site(s)

| Position(s) on known amino | |
|---|---|
| acid sequence | Present in variant protein? |
| 653 | no |
| 476 | no |
| 566 | no |
| 402 | no |
| 294 | no |

[0684] The phosphorylation sites of variant protein HSHGFR_P6 (SEQ ID NO:165), as compared to the known protein Hepatocyte growth factor precursor (SEQ ID NO:164), are described in Table 7 (given according to their position(s) on the amino acid sequence in the first column; the second column indicates whether the phosphorylation site is present in the variant protein; and the last column indicates whether the position is different on the variant protein).

TABLE 7
Phosphorylation site(s)

| Position(s) on known amino | Present in | |
|---|---|---|
| acid sequence | variant protein? | Position in variant protein? |
| 32 | yes | 32 |

[0685] Variant protein HSHGFR_P6 (SEQ ID NO:165) is encoded by the following transcript(s): HSHGFR_T6 (SEQ ID NO:147) and HSHGFR_T8 (SEQ ID NO:148), for which the sequence(s) is/are given at the end of the application.

[0686] The coding portion of transcript HSHGFR_T6 (SEQ ID NO:147) is shown in bold; this coding portion starts at position 229 and ends at position 1098. The transcript also has the following SNPs as listed in Table 8 (given according to their position on the nucleotide sequence, with the alternative nucleic acid listed; the last column indicates whether the SNP is known or not; the presence of known SNPs in variant protein HSHGFR_P6 (SEQ ID NO:165) sequence provides support for the deduced sequence of this variant protein according to the present invention).

TABLE 8
Nucleic acid SNPs

| SNP position on nucleotide | Alternative | |
|---|---|---|
| sequence | nucleic acid | Previously known SNP? |
| 218 | C -> | No |
| 219 | C -> T | No |
| 256 | C -> T | No |
| 385 | A -> G | No |
| 401 | A -> G | No |
| 445 | A -> G | No |
| 497 | A -> G | No |
| 508 | A -> G | No |
| 552 | G -> A | No |
| 561 | A -> G | No |
| 581 | T -> C | No |
| 604 | A -> G | No |
| 712 | T -> C | No |
| 728 | A -> G | No |
| 760 | C -> A | No |
| 780 | A -> G | No |
| 825 | A -> G | No |
| 857 | A -> G | No |
| 922 | T -> C | No |
| 935 | A -> G | No |
| 958 | A -> | No |
| 976 | T -> C | No |
| 1000 | A -> G | No |
| 1059 | C -> T | No |

[0687] The coding portion of transcript HSHGFR_T8 (SEQ ID NO:148) is shown in bold; this coding portion starts at position 229 and ends at position 1098. The transcript also has the following SNPs as listed in Table 9 (given according to their position on the nucleotide sequence, with the alternative nucleic acid listed; the last column indicates whether the SNP is known or not; the presence of known SNPs in variant protein HSHGFR_P6 (SEQ ID NO:165) sequence provides support for the deduced sequence of this variant protein according to the present invention).

TABLE 9
Nucleic acid SNPs

| SNP position on nucleotide | | Previously |
|---|---|---|
| sequence | Alternative nucleic acid | known SNP? |
| 218 | C -> | No |
| 219 | C -> T | No |
| 256 | C -> T | No |
| 385 | A -> G | No |
| 401 | A -> G | No |
| 445 | A -> G | No |
| 497 | A -> G | No |
| 508 | A -> G | No |
| 552 | G -> A | No |
| 561 | A -> G | No |
| 581 | T -> C | No |
| 604 | A -> G | No |
| 712 | T -> C | No |
| 728 | A -> G | No |
| 760 | C -> A | No |
| 780 | A -> G | No |
| 825 | A -> G | No |
| 857 | A -> G | No |
| 922 | T -> C | No |
| 935 | A -> G | No |
| 958 | A -> | No |
| 976 | T -> C | No |
| 1000 | A -> G | No |
| 1059 | C -> T | No |

[0688] Variant protein HSHGFR_P11 (SEQ ID NO:166) according to the present invention has an amino acid sequence as given at the end of the application; it is encoded by transcript(s) HSHGFR_T13 (SEQ ID NO:149). An alignment is given to the known protein (Hepatocyte growth factor precursor (SEQ ID NO:164)) at the end of the application. One or more alignments to one or more previously published protein sequences are given at the end of the application. A brief description of the relationship of the variant protein according to the present invention to each such aligned protein is as follows:

[0689] Comparison report between HSHGFR_P11 (SEQ ID NO:166) and HGF_HUMAN (SEQ ID NO:164):

[0690] 1. An isolated chimeric polypeptide encoding for HSHGFR_P11 (SEQ ID NO:166), comprising a first amino acid sequence being at least 90% homologous to MWVTKLLPALLLQHVLLHLLLLPIAIPYAEGQRKRRNTIHEFKKSAKTTLIKIDPALKIKT KKVNTADQCANRCTRNKGLPFTCKAFVFDKARKQCLWFPFNSMSSGVKKEFGHEFDL YENKDYIRNCIIGKGRSYKGTVSITKSGIKCQPWSSMIPHEH corresponding to amino acids 1-160 of HGF_HUMAN (SEQ ID NO:164), which also corresponds to amino acids 1-160 of HSHGFR_P11 (SEQ ID NO:166), a second amino acid sequence being at least 90% homologous to SYRGKDLQENYCRNPRGEEGGPWCFTSNPEVRYEVCDIPQCSE corresponding to amino acids 166-208 of HGF_HUMAN (SEQ ID NO:164), which also corresponds to amino acids 161-203 of HSHGFR_P11 (SEQ ID NO:166), and a third amino acid sequence being at least 70%, optionally at least 80%, preferably at least 85%, more preferably at least 90% and most preferably at least 95% homologous to a polypeptide having the sequence GK corresponding to amino acids 204-205 of HSHGFR_P11 (SEQ ID NO:166), wherein said first amino acid sequence, second amino acid sequence and third amino acid sequence are contiguous and in a sequential order.

[0691] 2. An isolated chimeric polypeptide encoding for an edge portion of HSHGFR_P11 (SEQ ID NO: 166), comprising a polypeptide having a length “n”, wherein n is at least about 10 amino acids in length, optionally at least about 20 amino acids in length, preferably at least about 30 amino acids in length, more preferably at least about 40 amino acids in length and most preferably at least about 50 amino acids in length, wherein at least two amino acids comprise HS, having a structure as follows: a sequence starting from any of amino acid numbers 160−x to 160; and ending at any of amino acid numbers 161+((n−2)−x), in which x varies from 0 to n−2.

[0692] The location of the variant protein was determined according to results from a number of different software programs and analyses, including analyses from SignalP and other specialized programs. The variant protein is believed to be located as follows with regard to the cell: secreted. The protein localization is believed to be secreted because both signal-peptide prediction programs predict that this protein has a signal peptide, and neither trans-membrane region prediction program predicts that this protein has a trans-membrane region.

[0693] Variant protein HSHGFR_P11 (SEQ ID NO:166) also has the following non-silent SNPs (Single Nucleotide Polymorphisms) as listed in Table 10, (given according to their position(s) on the amino acid sequence, with the alternative amino acid(s) listed; the last column indicates whether the SNP is known or not; the presence of known SNPs in variant protein HSHGFR_P11 (SEQ ID NO:166) Sequence provides support for the deduced sequence of this variant protein according to the present invention).

TABLE 10
Amino acid mutations

| SNP position(s) on amino acid | | Previously |
|---|---|---|
| sequence | Alternative amino acid(s) | known SNP? |
| 53 | I -> V | No |
| 58 | K -> R | No |
| 73 | R -> G | No |
| 90 | D -> G | No |
| 94 | K -> E | No |
| 118 | L -> P | No |
| 126 | R -> G | No |
| 162 | Y -> C | No |

[0694] The glycosylation sites of variant protein HSHGFR_P11 (SEQ ID NO:166), as compared to the known protein Hepatocyte growth factor precursor (SEQ ID NO:164), are described in Table 11 (given according to their position(s) on the amino acid sequence in the first column; the second column indicates whether the glycosylation site is present in the variant protein; and the last column indicates whether the position is different on the variant protein).

TABLE 11
Glycosylation site(s)

| Position(s) on known amino | |
|---|---|
| acid sequence | Present in variant protein? |
| 653 | no |
| 476 | no |
| 566 | no |
| 402 | no |
| 294 | no |

[0695] The phosphorylation sites of variant protein HSHGFR_P11 (SEQ ID NO:166), as compared to the known protein Hepatocyte growth factor precursor (SEQ ID NO:164), are described in Table 12 (given according to their position(s) on the amino acid sequence in the first column; the second column indicates whether the phosphorylation site is present in the variant protein; and the last column indicates whether the position is different on the variant protein).

TABLE 12
Phosphorylation site(s)

| Position(s) on known amino | | Position in |
|---|---|---|
| acid sequence | Present in variant protein? | variant protein? |
| 32 | yes | 32 |

[0696] Variant protein HSHGFR_P11 (SEQ ID NO:166) is encoded by the following transcript(s): HSHGFR_T13 (SEQ ID NO:149), for which the sequence(s) is/are given at the end of the application. The coding portion of transcript HSHGFR_T13 (SEQ ID NO:149) is shown in bold; this coding portion starts at position 229 and ends at position 843. The transcript also has the following SNPs as listed in Table 13 (given according to their position on the nucleotide sequence, with the alternative nucleic acid listed; the last column indicates whether the SNP is known or not; the presence of known SNPs in variant protein HSHGFR_P11 (SEQ ID NO:166) Sequence provides support for the deduced sequence of this variant protein according to the present invention).

TABLE 13
Nucleic acid SNPs

| SNP position on nucleotide | | Previously |
|---|---|---|
| sequence | Alternative nucleic acid | known SNP? |
| 218 | C -> | No |
| 219 | C -> T | No |
| 256 | C -> T | No |
| 385 | A -> G | No |
| 401 | A -> G | No |
| 445 | A -> G | No |
| 497 | A -> G | No |
| 508 | A -> G | No |
| 552 | G -> A | No |
| 561 | A -> G | No |
| 581 | T -> C | No |
| 604 | A -> G | No |
| 713 | A -> G | No |
| 745 | C -> A | No |
| 765 | A -> G | No |
| 810 | A -> G | No |
| 948 | A -> G | No |

[0697] Variant protein HSHGFR_P12 (SEQ ID NO:167) according to the present invention has an amino acid sequence as given at the end of the application; it is encoded by transcript(s) HSHGFR_T14 (SEQ ID NO:150). An alignment is given to the known protein (Hepatocyte growth factor precursor (SEQ ID NO:164)) at the end of the application. One or more alignments to one or more previously published protein sequences are given at the end of the application. A brief description of the relationship of the variant protein according to the present invention to each such aligned protein is as follows:

[0698] Comparison report between HSHGFR_P12 (SEQ ID NO:167) and HGF_HUMAN (SEQ ID NO: 164):

[0699] 1. An isolated chimeric polypeptide encoding for HSHGFR_P12 (SEQ ID NO:167), comprising a first amino acid sequence being at least 90% homologous to MWVTKLLPALLLQHVLLHLLLLPIAIPYAEGQRKRRNTIHEFKKSAKTTLIKIDPALKIKT KKVNTADQCANRCTRNKGLPFTCKAFVFDKARKQCLWFPFNSMSSGVKKEFGHEFDL YENKDYIRNCIIGKGRSYKGTVSITKSGIKCQPWSSMIPHEH corresponding to amino acids 1-160 of HGF_HUMAN (SEQ ID NO:164) which also corresponds to amino acids 1-160 of HSHGFR_P12 (SEQ ID NO:167), and a second amino acid sequence being at least 70%, optionally at least 80%, preferably at least 85%, more preferably at least 90% and most preferably at least 95% homologous to a polypeptide having the sequence R corresponding to amino acids 161-161 of HSHGFR_P12 (SEQ ID NO:167), wherein said first amino acid sequence and second amino acid sequence are contiguous and in a sequential order.

[0700] The location of the variant protein was determined according to results from a number of different software programs and analyses, including analyses from SignalP and other specialized programs. The variant protein is believed to be located as follows with regard to the cell: secreted. The protein localization is believed to be secreted because both signal-peptide prediction programs predict that this protein has a signal peptide, and neither trans-membrane region prediction program predicts that this protein has a trans-membrane region.

[0701] Variant protein HSHGFR_P12 (SEQ ID NO:167) also has the following non-silent SNPs (Single Nucleotide Polymorphisms) as listed in Table 14, (given according to their position(s) on the amino acid sequence, with the alternative amino acid(s) listed; the last column indicates whether the SNP is known or not; the presence of known SNPs in variant protein HSHGFR_P12 (SEQ ID NO:167) Sequence provides support for the deduced sequence of this variant protein according to the present invention).

TABLE 14
Amino acid mutations

| SNP position(s) on amino acid | | Previously |
|---|---|---|
| sequence | Alternative amino acid(s) | known SNP? |
| 53 | I -> V | No |
| 58 | K -> R | No |
| 73 | R -> G | No |
| 90 | D -> G | No |
| 94 | K -> E | No |
| 118 | L -> P | No |
| 126 | R -> G | No |

[0702] The glycosylation sites of variant protein HSHGFR_P12 (SEQ ID NO:167), as compared to the known protein Hepatocyte growth factor precursor (SEQ ID NO:164), are described in Table 15 (given according to their position(s) on the amino acid sequence in the first column; the second column indicates whether the glycosylation site is present in the variant protein; and the last column indicates whether the position is different on the variant protein).

TABLE 15
Glycosylation site(s)

| Position(s) on known amino | |
|---|---|
| acid sequence | Present in variant protein? |
| 653 | no |
| 476 | no |
| 566 | no |
| 402 | no |
| 294 | no |

[0703] The phosphorylation sites of variant protein HSHGFR_P12 (SEQ ID NO:167), as compared to the known protein Hepatocyte growth factor precursor (SEQ ID NO:164), are described in Table 16 (given according to their position(s) on the amino acid sequence in the first column; the second column indicates whether the phosphorylation site is present in the variant protein; and the last column indicates whether the position is different on the variant protein).

TABLE 16
Phosphorylation site(s)

| Position(s) on known amino | | Position in |
|---|---|---|
| acid sequence | Present in variant protein? | variant protein? |
| 32 | yes | 32 |

[0704] Variant protein HSHGFR_P12 (SEQ ID NO:167) is encoded by the following transcript(s): HSHGFR_T14 (SEQ ID NO:150), for which the sequence(s) is/are given at the end of the application. The coding portion of transcript HSHGFR_T14 (SEQ ID NO:150) is shown in bold; this coding portion starts at position 229 and ends at position 711. The transcript also has the following SNPs as listed in Table 17 (given according to their position on the nucleotide sequence, with the alternative nucleic acid listed; the last column indicates whether the SNP is known or not; the presence of known SNPs in variant protein HSHGFR_P12 (SEQ ID NO:167) Sequence provides support for the deduced sequence of this variant protein according to the present invention).

TABLE 17
Nucleic acid SNPs

| SNP position on nucleotide | | Previously |
|---|---|---|
| sequence | Alternative nucleic acid | known SNP? |
| 218 | C -> | No |
| 219 | C -> T | No |
| 256 | C -> T | No |
| 385 | A -> G | No |
| 401 | A -> G | No |
| 445 | A -> G | No |
| 497 | A -> G | No |
| 508 | A -> G | No |
| 552 | G -> A | No |
| 561 | A -> G | No |
| 581 | T -> C | No |
| 604 | A -> G | No |

[0705] Variant protein HSHGFR_P13 (SEQ ID NO:168) according to the present invention has an amino acid sequence as given at the end of the application; it is encoded by transcript(s) HSHGFR_T1. An alignment is given to the known protein (Hepatocyte growth factor precursor (SEQ ID NO:164)) at the end of the application. One or more alignments to one or more previously published protein sequences are given at the end of the application. A brief description of the relationship of the variant protein according to the present invention to each such aligned protein is as follows:

[0706] Comparison report between HSHGFR_P13 (SEQ ID NO:168) and HGF_HUMAN (SEQ ID NO:164):

[0707] 1. An isolated chimeric polypeptide encoding for HSHGFR_P13 (SEQ ID NO:168), comprising a first amino acid sequence being at least 90% homologous to MWVTKLLPALLLQHVLLHLLLLPIAIPYAEGQRKRRNTIHEFKKSAKTTLIKIDPALKIKT KKVNTADQCANRCTRNKGLPFTCKAFVFDKARKQCLWFPFNSMSSGVKKEFGHEFDL YENKDYIRNCIIGKGRSYKGTVSITKSGIKCQPWSSMIPHEHSFLPSSYRGKDLQENYCR NPRGEEGGPWCFTSNPEVRYEVCDIPQCSEVECMTCNGESYRGLMDHTESGKICQRWD HQTPHRHKFLPERYPDKGFDDNYCRNPDGQPRPWCYTLDPHTRWEYCAIK corresponding to amino acids 1-286 of HGF_HUMAN (SEQ ID NO:164), which also corresponds to amino acids 1-286 of HSHGFR_P13 (SEQ ID NO:168), and a second amino acid sequence being at least 70%, optionally at least 80%, preferably at least 85%, more preferably at least 90% and most preferably at least 95% homologous to a polypeptide having the sequence NMRDITWALN (SEQ ID NO:494) corresponding to amino acids 287-296 of HSHGFR_P13 (SEQ ID NO:168), wherein said first amino acid sequence and second amino acid sequence are contiguous and in a sequential order.

[0708] 2. An isolated polypeptide encoding for a tail of HSHGFR_P13 (SEQ ID NO:168), comprising a polypeptide being at least 70%, optionally at least about 80%, preferably at least about 85%, more preferably at least about 90% and most preferably at least about 95% homologous to the sequence NMRDITWALN (SEQ ID NO:494) in HSHGFR_P13 (SEQ ID NO:168).

[0709] The location of the variant protein was determined according to results from a number of different software programs and analyses, including analyses from SignalP and other specialized programs. The variant protein is believed to be located as follows with regard to the cell: secreted. The protein localization is believed to be secreted because both signal-peptide prediction programs predict that this protein has a signal peptide, and neither trans-membrane region prediction program predicts that this protein has a trans-membrane region.

[0710] Variant protein HSHGFR_P13 (SEQ ID NO:168) also has the following non-silent SNPs (Single Nucleotide Polymorphisms) as listed in Table 18, (given according to their position(s) on the amino acid sequence, with the alternative amino acid(s) listed; the last column indicates whether the SNP is known or not; the presence of known SNPs in variant protein HSHGFR_P13 (SEQ ID NO:168) Sequence provides support for the deduced sequence of this variant protein according to the present invention).

TABLE 18
Amino acid mutations

| SNP position(s) on amino acid | | Previously |
|---|---|---|
| sequence | Alternative amino acid(s) | known SNP? |
| 53 | I -> V | No |
| 58 | K -> R | No |
| 73 | R -> G | No |
| 90 | D -> G | No |
| 94 | K -> E | No |
| 118 | L -> P | No |
| 126 | R -> G | No |
| 162 | F -> L | No |
| 167 | Y -> C | No |
| 210 | E -> G | No |
| 232 | C -> R | No |
| 236 | D -> G | No |
| 244 | K -> | No |
| 250 | Y -> H | No |
| 258 | N -> D | No |

[0711] The glycosylation sites of variant protein HSHGFR_P13 (SEQ ID NO:168), as compared to the known protein Hepatocyte growth factor precursor (SEQ ID NO:164), are described in Table 19 (given according to their position(s) on the amino acid sequence in the first column; the second column indicates whether the glycosylation site is present in the variant protein; and the last column indicates whether the position is different on the variant protein).

TABLE 19
Glycosylation site(s)

| Position(s) on known amino | |
|---|---|
| acid sequence | Present in variant protein? |
| 653 | no |
| 476 | no |
| 566 | no |
| 402 | no |
| 294 | no |

[0712] The phosphorylation sites of variant protein HSHGFR_P13 (SEQ ID NO:168), as compared to the known protein Hepatocyte growth factor precursor (SEQ ID NO:164), are described in Table 20 (given according to their position(s) on the amino acid sequence in the first column; the second column indicates whether the phosphorylation site is present in the variant protein; and the last column indicates whether the position is different on the variant protein).

TABLE 20
Phosphorylation site(s)

| Position(s) on known amino | Present in | |
|---|---|---|
| acid sequence | variant protein? | Position in variant protein? |
| 32 | yes | 32 |

[0713] Variant protein HSHGFR_P13 (SEQ ID NO:168) is encoded by the following transcript(s): HSHGFR_T1 (SEQ ID NO:146), for which the sequence(s) is/are given at the end of the application. The coding portion of transcript HSHGFR_T1 (SEQ ID NO:146) is shown in bold; this coding portion starts at position 229 and ends at position 1115. The transcript also has the following SNPs as listed in Table 21 (given according to their position on the nucleotide sequence, with the alternative nucleic acid listed; the last column indicates whether the SNP is known or not; the presence of known SNPs in variant protein HSHGFR_P13 (SEQ ID NO:168) sequence provides support for the deduced sequence of this variant protein according to the present invention).

TABLE 21
Nucleic acid SNPs

| SNP position on nucleotide | Alternative | |
|---|---|---|
| sequence | nucleic acid | Previously known SNP? |
| 218 | C -> | No |
| 219 | C -> T | No |
| 256 | C -> T | No |
| 385 | A -> G | No |
| 401 | A -> G | No |
| 445 | A -> G | No |
| 497 | A -> G | No |
| 508 | A -> G | No |
| 552 | G -> A | No |
| 561 | A -> G | No |
| 581 | T -> C | No |
| 604 | A -> G | No |
| 712 | T -> C | No |
| 728 | A -> G | No |
| 760 | C -> A | No |
| 780 | A -> G | No |
| 825 | A -> G | No |
| 857 | A -> G | No |
| 922 | T -> C | No |
| 935 | A -> G | No |
| 958 | A -> | No |
| 976 | T -> C | No |
| 1000 | A -> G | No |
| 1059 | C -> T | No |
| 1094 | A -> C | No |
| 1117 | G -> A | No |
| 1203 | C -> T | No |
| 1353 | A -> T | No |

[0714] As noted above, cluster HSHGFR features 13 segment(s), which were listed in Table 2 above and for which the sequence(s) are given at the end of the application. These segment(s) are portions of nucleic acid sequence(s) which are described herein separately because they are of particular interest. A description of each segment according to the present invention is now provided.

[0715] Segment cluster HSHGFR_node_{—}2 (SEQ ID NO:151) according to the present invention is supported by 10 libraries. The number of libraries was determined as previously described. This segment can be found in the following transcript(s): HSHGFR_T1 (SEQ ID NO:146), HSHGFR_T6 (SEQ ID NO:147), HSHGFR_T8 (SEQ ID NO:148), HSHGFR_T13 (SEQ ID NO:149) and HSHGFR_T14 (SEQ ID NO:150). Table 22 below describes the starting and ending position of this segment on each transcript.

TABLE 22
Segment location on transcripts

| | Segment | Segment |
|---|---|---|
| Transcript name | starting position | ending position |
| HSHGFR_T1 (SEQ ID NO: 146) | 1 | 171 |
| HSHGFR_T6 (SEQ ID NO: 147) | 1 | 171 |
| HSHGFR_T8 (SEQ ID NO: 148) | 1 | 171 |
| HSHGFR_T13 (SEQ ID NO: 149) | 1 | 171 |
| HSHGFR_T14 (SEQ ID NO: 150) | 1 | 171 |

[0716] Segment cluster HSHGFR_node_{—}2 (SEQ ID NO:152) according to the present invention is supported by 25 libraries. The number of libraries was determined as previously described. This segment can be found in the following transcript(s): HSHGFR_T1 (SEQ ID NO:146), HSHGFR_T6 (SEQ ID NO:147), HSHGFR_T8 (SEQ ID NO:148), HSHGFR_T13 (SEQ ID NO:149) and HSHGFR_T14 (SEQ ID NO:150). Table 23 below describes the starting and ending position of this segment on each transcript.

TABLE 23
Segment location on transcripts

| | Segment | Segment |
|---|---|---|
| Transcript name | starting position | ending position |
| HSHGFR_T1 (SEQ ID NO: 146) | 172 | 316 |
| HSHGFR_T6 (SEQ ID NO: 147) | 172 | 316 |
| HSHGFR_T8 (SEQ ID NO: 148) | 172 | 316 |
| HSHGFR_T13 (SEQ ID NO: 149) | 172 | 316 |
| HSHGFR_T14 (SEQ ID NO: 150) | 172 | 316 |

[0717] Segment cluster HSHGFR_node_{—}6 (SEQ ID NO:153) according to the present invention is supported by 31 libraries. The number of libraries was determined as previously described. This segment can be found in the following transcript(s): HSHGFR_T1 (SEQ ID NO:146), HSHGFR_T6 (SEQ ID NO:147), HSHGFR_T8 (SEQ ID NO:148), HSHGFR_T13 (SEQ ID NO:149) and HSHGFR_T14 (SEQ ID NO:150). Table 24 below describes the starting and ending position of this segment on each transcript.

TABLE 24
Segment location on transcripts

| | Segment | Segment |
|---|---|---|
| Transcript name | starting position | ending position |
| HSHGFR_T1 (SEQ ID NO: 146) | 317 | 482 |
| HSHGFR_T6 (SEQ ID NO: 147) | 317 | 482 |
| HSHGFR_T8 (SEQ ID NO: 148) | 317 | 482 |
| HSHGFR_T13 (SEQ ID NO: 149) | 317 | 482 |
| HSHGFR_T14 (SEQ ID NO: 150) | 317 | 482 |

[0718] Segment cluster HSHGFR_node_{—}11 (SEQ ID NO:154) according to the present invention is supported by 4 libraries. The number of libraries was determined as previously described. This segment can be found in the following transcript(s): HSHGFR_T14 (SEQ ID NO:150). Table 25 below describes the starting and ending position of this segment on each transcript.

TABLE 25
Segment location on transcripts

| | Segment | Segment |
|---|---|---|
| Transcript name | starting position | ending position |
| HSHGFR_T14 (SEQ ID NO: 150) | 711 | 1221 |

[0719] Segment cluster HSHGFR_node_{—}15 (SEQ ID NO:155) according to the present invention is supported by 24 libraries. The number of libraries was determined as previously described. This segment can be found in the following transcript(s): HSHGFR_T1 (SEQ ID NO:146), HSHGFR_T6 (SEQ ID NO:147), HSHGFR_T8 (SEQ ID NO:148) and HSHGFR_T13 (SEQ ID NO:149). Table 26 below describes the starting and ending position of this segment on each transcript.

TABLE 26
Segment location on transcripts

| | Segment | Segment |
|---|---|---|
| Transcript name | starting position | ending position |
| HSHGFR_T1 (SEQ ID NO: 146) | 726 | 853 |
| HSHGFR_T6 (SEQ ID NO: 147) | 726 | 853 |
| HSHGFR_T8 (SEQ ID NO: 148) | 726 | 853 |
| HSHGFR_T13 (SEQ ID NO: 149) | 711 | 838 |

[0720] Segment cluster HSHGFR_node_{—}16 (SEQ ID NO:156) according to the present invention is supported by 15 libraries. The number of libraries was determined as previously described. This segment can be found in the following transcript(s): HSHGFR_T13 (SEQ ID NO:149). Table 27 below describes the starting and ending position of this segment on each transcript.

TABLE 27
Segment location on transcripts

| | Segment | Segment |
|---|---|---|
| Transcript name | starting position | ending position |
| HSHGFR_T13 (SEQ ID NO: 149) | 839 | 2068 |

[0721] Segment cluster HSHGFR_node_{—}18 (SEQ ID NO:157) according to the present invention is supported by 25 libraries. The number of libraries was determined as previously described. This segment can be found in the following transcript(s): HSHGFR_T1 (SEQ ID NO:146), HSHGFR_T6 (SEQ ID NO:147) and HSHGFR_T8 (SEQ ID NO:148). Table 28 below describes the starting and ending position of this segment on each transcript.

TABLE 28
Segment location on transcripts

| | Segment | Segment |
|---|---|---|
| Transcript name | starting position | ending position |
| HSHGFR_T1 (SEQ ID NO: 146) | 854 | 974 |
| HSHGFR_T6 (SEQ ID NO: 147) | 854 | 974 |
| HSHGFR_T8 (SEQ ID NO: 148) | 854 | 974 |

[0722] Segment cluster HSHGFR_node_{—}22 (SEQ ID NO:158) according to the present invention is supported by 12 libraries. The number of libraries was determined as previously described. This segment can be found in the following transcript(s): HSHGFR_T1 (SEQ ID NO:146). Table 29 below describes the starting and ending position of this segment on each transcript.

TABLE 29
Segment location on transcripts

| | Segment | Segment |
|---|---|---|
| Transcript name | starting position | ending position |
| HSHGFR_T1 (SEQ ID NO: 146) | 1094 | 1353 |

[0723] Segment cluster HSHGFR_node_{—}24 (SEQ ID NO:159) according to the present invention is supported by 4 libraries. The number of libraries was determined as previously described. This segment can be found in the following transcript(s): HSHGFR_T6 (SEQ ID NO:147) and HSHGFR_T8 (SEQ ID NO:148). Table 30 below describes the starting and ending position of this segment on each transcript.

TABLE 30
Segment location on transcripts

| | Segment | Segment |
|---|---|---|
| Transcript name | starting position | ending position |
| HSHGFR_T6 (SEQ ID NO: 147) | 1094 | 1286 |
| HSHGFR_T8 (SEQ ID NO: 148) | 1094 | 1367 |

[0724] According to an optional embodiment of the present invention, short segments related to the above cluster are also provided. These segments are up to about 120 bp in length, and so are included in a separate description.

[0725] Segment cluster HSHGFR_node_{—}8 (SEQ ID NO:160) according to the present invention is supported by 26 libraries. The number of libraries was determined as previously described. This segment can be found in the following transcript(s): HSHGFR_T1 (SEQ ID NO:146), HSHGFR_T6 (SEQ ID NO:147), HSHGFR_T8 (SEQ ID NO:148), HSHGFR_T13 (SEQ ID NO:149) and HSHGFR_T14 (SEQ ID NO:150). Table 31 below describes the starting and ending position of this segment on each transcript.

TABLE 31
Segment location on transcripts

| | Segment | Segment |
|---|---|---|
| Transcript name | starting position | ending position |
| HSHGFR_T1 (SEQ ID NO: 146) | 483 | 595 |
| HSHGFR_T6 (SEQ ID NO: 147) | 483 | 595 |
| HSHGFR_T8 (SEQ ID NO: 148) | 483 | 595 |
| HSHGFR_T13 (SEQ ID NO: 149) | 483 | 595 |
| HSHGFR_T14 (SEQ ID NO: 150) | 483 | 595 |

[0726] Segment cluster HSHGFR_node_{—}10 (SEQ ID NO:161) according to the present invention is supported by 26 libraries. The number of libraries was determined as previously described. This segment can be found in the following transcript(s): HSHGFR_T1 (SEQ ID NO:146), HSHGFR_T6 (SEQ ID NO:147), HSHGFR_T8 (SEQ ID NO:148), HSHGFR_T13 (SEQ ID NO:149) and HSHGFR_T14 (SEQ ID NO:150). Table 32 below describes the starting and ending position of this segment on each transcript.

TABLE 32
Segment location on transcripts

| | Segment | Segment |
|---|---|---|
| Transcript name | starting position | ending position |
| HSHGFR_T1 (SEQ ID NO: 146) | 596 | 710 |
| HSHGFR_T6 (SEQ ID NO: 147) | 596 | 710 |
| HSHGFR_T8 (SEQ ID NO: 148) | 596 | 710 |
| HSHGFR_T13 (SEQ ID NO: 149) | 596 | 710 |
| HSHGFR_T14 (SEQ ID NO: 150) | 596 | 710 |

[0727] Segment cluster HSHGFR_node_{—}14 (SEQ ID NO:162) according to the present invention can be found in the following transcript(s): HSHGFR_T1 (SEQ ID NO:146), HSHGFR_T6 (SEQ ID NO:147) and HSHGFR_T8 (SEQ ID NO:148). Table 33 below describes the starting and ending position of this segment on each transcript.

TABLE 33
Segment location on transcripts

| | Segment | Segment |
|---|---|---|
| Transcript name | starting position | ending position |
| HSHGFR_T1 (SEQ ID NO: 146) | 711 | 725 |
| HSHGFR_T6 (SEQ ID NO: 147) | 711 | 725 |
| HSHGFR_T8 (SEQ ID NO: 148) | 711 | 725 |

[0728] Segment cluster HSHGFR_node_{—}20 (SEQ ID NO:163) according to the present invention is supported by 25 libraries. The number of libraries was determined as previously described. This segment can be found in the following transcript(s): HSHGFR_T1 (SEQ ID NO:146), HSHGFR_T6 (SEQ ID NO:147) and HSHGFR_T8 (SEQ ID NO:148). Table 34 below describes the starting and ending position of this segment on each transcript.

TABLE 34
3Segment location on transcripts

| | Segment | Segment |
|---|---|---|
| Transcript name | starting position | ending position |
| HSHGFR_T1 (SEQ ID NO: 146) | 975 | 1093 |
| HSHGFR_T6 (SEQ ID NO: 147) | 975 | 1093 |
| HSHGFR_T8 (SEQ ID NO: 148) | 975 | 1093 |

[0729] Variant protein alignment to the previously known protein:

| Sequence name: HGF_HUMAN (SEQ ID NO: 164) | | | |
|---|---|---|---|
| Sequence documentation: | | | |
| Alignment of: HSHGFR_P6 (SEQ ID NO: 165) × HGF_HUMAN (SEQ ID NO: 164) .. | | | |
| Alignment segment 1/1: | | | |
| Quality: | 2989.00 | Escore: | 0 |
| Matching length: | 290 | Total length: | 290 |
| Matching Percent Similarity: | 100.00 | Matching Percent Identity: | 99.66 |
| Total Percent Similarity: | 100.00 | Total Percent Identity: | 99.66 |
| Gaps: | 0 | | |

| Alignment: | | |
|---|---|---|
| | . . . . . | |
| 1 | MWVTKLLPALLLQHVLLHLLLLPIAIPYAEGQRKRRNTIHEFKKSAKTTL | 50 |
| | \|\|\|\|\|\|\|\|\|\|\|\|\|\|\|\|\|\|\|\|\|\|\|\|\|\|\|\|\|\|\|\|\|\|\|\|\|\|\|\|\|\|\|\|\|\|\|\|\|\| | |
| 1 | MWVTKLLPALLLQHVLLHLLLLPIAIPYAEGQRKRRNTIHEFKKSAKTTL | 50 |
| | . . . . . | |
| 51 | IKIDPALKIKTKKVNTADQCANRCTRNKGLPFTCKAFVFDKARKQCLWFP | 100 |
| | \|\|\|\|\|\|\|\|\|\|\|\|\|\|\|\|\|\|\|\|\|\|\|\|\|\|\|\|\|\|\|\|\|\|\|\|\|\|\|\|\|\|\|\|\|\|\|\|\|\| | |
| 51 | IKIDPALKIKTKKVNTADQCANRCTRNKGLPFTCKAFVFDKARKQCLWFP | 100 |
| | . . . . . | |
| 101 | FNSMSSGVKKEFGHEFDLYENKDYIRNCIIGKGRSYKGTVSITKSGIKCQ | 150 |
| | \|\|\|\|\|\|\|\|\|\|\|\|\|\|\|\|\|\|\|\|\|\|\|\|\|\|\|\|\|\|\|\|\|\|\|\|\|\|\|\|\|\|\|\|\|\|\|\|\|\| | |
| 101 | FNSMSSGVKKEFGHEFDLYENKDYIRNCIIGKGRSYKGTVSITKSGIKCQ | 150 |
| | . . . . . | |
| 151 | PWSSMIPHEHSFLPSSYRGKDLQENYCRNPRGEEGGPWCFTSNPEVRYEV | 200 |
| | \|\|\|\|\|\|\|\|\|\|\|\|\|\|\|\|\|\|\|\|\|\|\|\|\|\|\|\|\|\|\|\|\|\|\|\|\|\|\|\|\|\|\|\|\|\|\|\|\|\| | |
| 151 | PWSSMIPHEHSFLPSSYRGKOLQENYCRNPRGEEGGPWCFTSNPEVRYEV | 200 |
| | . . . . . | |
| 201 | CDIPQCSEVECMTCNGESYRGLMDHTESGKICQRWDHQTPHRHKFLPERY | 250 |
| | \|\|\|\|\|\|\|\|\|\|\|\|\|\|\|\|\|\|\|\|\|\|\|\|\|\|\|\|\|\|\|\|\|\|\|\|\|\|\|\|\|\|\|\|\|\|\|\|\|\| | |
| 201 | CDIPQCSEVECMTCNGESYRGLMDHTESGKICQRWDHQTPHRHKFLPERY | 250 |
| | . . . . | |
| 251 | PDKGFDDNYCRNPDGQPRPWCYTLDPHTRWEYCAIKTCAE | 290 |
| | \|\|\|\|\|\|\|\|\|\|\|\|\|\|\|\|\|\|\|\|\|\|\|\|\|\|\|\|\|\|\|\|\|\|\|\|\|\|\|: | |
| 251 | PDKGFDDNYCRNPDGQPRPWCYTLDPHTRWEYCAIKTCAD | 290 |

| Sequence name: HGF_HUMAN (SEQ ID NO: 164) | | | |
|---|---|---|---|
| Sequence documentation: | | | |
| Alignment of: HSHGFR_P11 (SEQ ID NO: 166) × HGF_HUMAN (SEQ ID NO: 164) .. | | | |
| Alignment segment 1/1: | | | |
| Quality: | 1957.00 | Escore: | 0 |
| Matching length: | 203 | Total length: | 208 |
| Matching Percent Similarity: | 100.00 | Matching Percent Identity: | 100.00 |
| Total Percent Similarity: | 97.60 | Total Percent Identity: | 97.60 |
| Gaps: | 1 | | |

| Alignment: | | |
|---|---|---|
| | . . . . . | |
| 1 | MWVTKLLPALLLQHVLLHLLLLPIAIPYAEGQRKRRNTIHEFKKSAKTTL | 50 |
| | \|\|\|\|\|\|\|\|\|\|\|\|\|\|\|\|\|\|\|\|\|\|\|\|\|\|\|\|\|\|\|\|\|\|\|\|\|\|\|\|\|\|\|\|\|\|\|\|\|\| | |
| 1 | MWVTKLLPALLLQHVLLHLLLLPIAIPYAEGQRKRRNTIHEFKKSAKTTL | 50 |
| | . . . . . | |
| 51 | IKIDPALKIKTKKVNTADQCANRCTRNKGLPFTCKAFVFDKARKQCLWFP | 100 |
| | \|\|\|\|\|\|\|\|\|\|\|\|\|\|\|\|\|\|\|\|\|\|\|\|\|\|\|\|\|\|\|\|\|\|\|\|\|\|\|\|\|\|\|\|\|\|\|\|\|\| | |
| 51 | IKIDPALKIKTKKVNTADQCANRCTRNKGLPFTCKAFVFDKARKQCLWFP | 100 |
| | . . . . . | |
| 101 | FNSMSSGVKKEFGHEFDLYENKDYIRNCIIGKGRSYKGTVSITKSGIKCQ | 150 |
| | \|\|\|\|\|\|\|\|\|\|\|\|\|\|\|\|\|\|\|\|\|\|\|\|\|\|\|\|\|\|\|\|\|\|\|\|\|\|\|\|\|\|\|\|\|\|\|\|\|\| | |
| 101 | FNSMSSGVKKEFGHEFDLYENKDYIRNCIIGKGRSYKGTVSITKSGIKCQ | 150 |
| | . . . . . | |
| 151 | PWSSMIPHEH.....SYRGKDLQENYCRNPRGEEGGPWCFTSNPEVRYEV | 195 |
| | \|\|\|\|\|\|\|\|\|\| \|\|\|\|\|\|\|\|\|\|\|\|\|\|\|\|\|\|\|\|\|\|\|\|\|\|\|\|\|\|\|\|\|\|\| | |
| 151 | PWSSMIPHEHSFLPSSYRGKDLQENYCRNPRGEEGGPWCFTSNPEVRYEV | 200 |
| 196 | CDIPQCSE | 203 |
| | \|\|\|\|\|\|\|\| | |
| 201 | CDIPQCSE | 208 |

| Sequence name: HGF_HUMAN (SEQ ID NO: 164) | | | |
|---|---|---|---|
| Sequence documentation: | | | |
| Alignment of: HSHGFR_P12 (SEQ ID NO: 167) × HGF_HUMAN (SEQ ID NO: 164) .. | | | |
| Alignment segment 1/1: | | | |
| Quality: | 1600.00 | Escore: | 0 |
| Matching length: | 160 | Total length: | 160 |
| Matching Percent Similarity: | 100.00 | Matching Percent Identity: | 100.00 |
| Total Percent Similarity: | 100.00 | Total Percent Identity: | 100.00 |
| Gaps: | 0 | | |

| Alignment: | | |
|---|---|---|
| | . . . . . | |
| 1 | MWVTKLLPALLLQHVLLHLLLLPIAIPYAEGQRKRRNTIHEFKKSAKTTL | 50 |
| | \|\|\|\|\|\|\|\|\|\|\|\|\|\|\|\|\|\|\|\|\|\|\|\|\|\|\|\|\|\|\|\|\|\|\|\|\|\|\|\|\|\|\|\|\|\|\|\|\|\| | |
| 1 | MWVTKLLPALLLQHVLLHLLLLPIAIPYAEGQRKRRNTIHEFKKSAKTTL | 50 |
| | . . . . . | |
| 51 | IKIDPALKIKTKKVNTADQCANRCTRNKGLPFTCKAFVFDKARKQCLWFP | 100 |
| | \|\|\|\|\|\|\|\|\|\|\|\|\|\|\|\|\|\|\|\|\|\|\|\|\|\|\|\|\|\|\|\|\|\|\|\|\|\|\|\|\|\|\|\|\|\|\|\|\|\| | |
| 51 | IKIDPALKIKTKKVNTADQCANRCTRNEGLPFTCKAFVFDKARKQCLWFP | 100 |
| | . . . . . | |
| 101 | FNSMSSGVKKEFGHEFDLYENKDYIRNCIIGKGRSYKGTVSITKSGIKCQ | 150 |
| | \|\|\|\|\|\|\|\|\|\|\|\|\|\|\|\|\|\|\|\|\|\|\|\|\|\|\|\|\|\|\|\|\|\|\|\|\|\|\|\|\|\|\|\|\|\|\|\|\|\| | |
| 101 | FNSMSSGVKKEFGHEFDLYENKDYIRNCIIGKGRSYKGTVSITKSGIKCQ | 150 |
| | . | |
| 151 | PWSSMIPHEH | 160 |
| | \|\|\|\|\|\|\|\|\|\| | |
| 151 | PWSSMIPHEH | 160 |

| Sequence name: HGF_HUMAN (SEQ ID NO: 164) | | | |
|---|---|---|---|
| Sequence documentation: | | | |
| Alignment of: HSHGFR_P13 (SEQ ID NO: 168) × HGF_HUMAN (SEQ ID NO: 164) .. | | | |
| Alignment segment 1/1: | | | |
| Quality: | 2960.00 | Escore: | 0 |
| Matching length: | 292 | Total length: | 292 |
| Matching Percent Similarity: | 98.63 | Matching Percent Identity: | 98.63 |
| Total Percent Similarity: | 98.63 | Total Percent Identity: | 98.63 |
| Gaps: | 0 | | |

| Alignment: | | |
|---|---|---|
| | . . . . . | |
| 1 | MWVTKLLPALLLQHVLLHLLLLPIAIPYAEGQRKRRNTIHEFKKSAKTTL | 50 |
| | \|\|\|\|\|\|\|\|\|\|\|\|\|\|\|\|\|\|\|\|\|\|\|\|\|\|\|\|\|\|\|\|\|\|\|\|\|\|\|\|\|\|\|\|\|\|\|\|\|\| | |
| 1 | MWVTKLLPALLLQHVLLHLLLLPIAIPYAEGQRKRRNTIHEFKKSAKTTL | 50 |
| | . . . . . | |
| 51 | IKIDPALKIKTKKVNTADQCANRCTRNKGLPFTCKAFVFDKARKQCLWFP | 100 |
| | \|\|\|\|\|\|\|\|\|\|\|\|\|\|\|\|\|\|\|\|\|\|\|\|\|\|\|\|\|\|\|\|\|\|\|\|\|\|\|\|\|\|\|\|\|\|\|\|\|\| | |
| 51 | IKIDPALKIKTKKVNTADQCANRCTRNKGLPFTCKAFVFDKARKQCLWFP | 100 |
| | . . . . . | |
| 101 | FNSMSSGVKKEFGHEFDLYENKDYIRNCIIGKGRSYKGTVSITKSGIKCQ | 150 |
| | \|\|\|\|\|\|\|\|\|\|\|\|\|\|\|\|\|\|\|\|\|\|\|\|\|\|\|\|\|\|\|\|\|\|\|\|\|\|\|\|\|\|\|\|\|\|\|\|\|\| | |
| 101 | FNSMSSGVKKEFGHEFDLYENKDYIRNCIIGKGRSYKGTVSITKSGIKCQ | 150 |
| | . . . . . | |
| 151 | PWSSMIPHEHSFLPSSYRGKDLQENYCRNPRGEEGGPWCFTSNPEVRYEV | 200 |
| | \|\|\|\|\|\|\|\|\|\|\|\|\|\|\|\|\|\|\|\|\|\|\|\|\|\|\|\|\|\|\|\|\|\|\|\|\|\|\|\|\|\|\|\|\|\|\|\|\|\| | |
| 151 | PWSSMIPHEHSFLPSSYRGKDLQENYCRNPRGEEGGPWCFTSNPEVRYEV | 200 |
| | . . . . . | |
| 201 | CDIPQCSEVECMTCNGESYRGLMDHTESGKICQRWDHQTPHRHKFLPERY | 250 |
| | \|\|\|\|\|\|\|\|\|\|\|\|\|\|\|\|\|\|\|\|\|\|\|\|\|\|\|\|\|\|\|\|\|\|\|\|\|\|\|\|\|\|\|\|\|\|\|\|\|\| | |
| 201 | CDIPQCSEVECMTCNGESYRGLMDHTESGKICQRWDHQTPHRHKFLPERY | 250 |
| | . . . . | |
| 251 | PDKGFDDNYCRNPDGQPRPWCYTLDPHTRWEYCAIKNMRDIT | 292 |
| | \|\|\|\|\|\|\|\|\|\|\|\|\|\|\|\|\|\|\|\|\|\|\|\|\|\|\|\|\|\|\|\|\|\|\|\| \| \| | |
| 251 | PDKGFDDNYCRNPDGQPRPWCYTLDPHTRWEYCAIKTCADNT | 292 |

### Description for Cluster S56892

[0730] Cluster S56892 features 4 transcript(s) and 20 segment(s) of interest, the names for which are given in Tables 1 and 2, respectively, the sequences themselves are given at the end of the application. The selected protein variants are given in table 3.

TABLE 1
Transcripts of interest

| Transcript Name | Sequence ID No. |
|---|---|
| S56892_PEA_1_T3 | 169 |
| S56892_PEA_1_T9 | 170 |
| S56892_PEA_1_T10 | 171 |
| S56892_PEA_1_T13 | 172 |

[0731] TABLE 2
Segments of interest

| Segment Name | Sequence ID No. |
|---|---|
| S56892_PEA_1_node_0 | 173 |
| S56892_PEA_1_node_5 | 174 |
| S56892_PEA_1_node_10 | 175 |
| S56892_PEA_1_node_18 | 176 |
| S56892_PEA_1_node_21 | 177 |
| S56892_PEA_1_node_3 | 178 |
| S56892_PEA_1_node_4 | 179 |
| S56892_PEA_1_node_6 | 180 |
| S56892_PEA_1_node_7 | 181 |
| S56892_PEA_1_node_8 | 182 |
| S56892_PEA_1_node_9 | 183 |
| S56892_PEA_1_node_12 | 184 |
| S56892_PEA_1_node_13 | 185 |
| S56892_PEA_1_node_14 | 186 |
| S56892_PEA_1_node_16 | 187 |
| S56892_PEA_1_node_17 | 188 |
| S56892_PEA_1_node_19 | 189 |
| S56892_PEA_1_node_20 | 190 |
| S56892_PEA_1_node_22 | 191 |
| S56892_PEA_1_node_23 | 192 |

[0732] TABLE 3
Proteins of interest

| | Sequence ID | |
|---|---|---|
| Protein Name | No. | Corresponding Transcript(s) |
| S56892_PEA_1_P2 | 194 | S56892_PEA_1_T3 (SEQ ID |
| | | NO: 169) |
| S56892_PEA_1_P8 | 195 | S56892_PEA_1_T9 (SEQ ID |
| | | NO: 170) |
| S56892_PEA_1_P9 | 196 | S56892_PEA_1_T10 (SEQ |
| | | ID NO: 171) |
| S56892_PEA_1_P11 | 197 | S56892_PEA_1_T13 (SEQ |
| | | ID NO: 172) |

[0733] These sequences are variants of the known protein Interleukin-6 precursor (SEQ ID NO:193) (SwissProt accession identifier IL6_HUMAN (SEQ ID NO:193); known also according to the synonyms IL-6; B-cell stimulatory factor 2; BSF-2; Interferon beta-2; Hybridoma growth factor; CTL differentiation factor; CDF), referred to herein as the previously known protein.

[0734] Protein Interleukin-6 precursor (SEQ ID NO:193) is known or believed to have the following function(s): IL-6 is a cytokine with a wide variety of biological functions: it plays an essential role in the final differentiation of B-cells into Ig-secreting cells, it induces myeloma and plasmacytoma growth, it induces nerve cells differentiation and in hepatocytes it induces acute phase reactants. The sequence for protein Interleukin-6 precursor is given at the end of the application, as “Interleukin-6 precursor amino acid sequence” (SEQ ID NO:193). Known polymorphisms for this sequence are as shown in Table 4.

TABLE 4
Amino acid mutations for Known Protein

| SNP position(s) on amino | |
|---|---|
| acid sequence | Comment |
| 32 | P -> S. /FTId = VAR_013075. |
| 162 | D -> V. /FTId = VAR_013076. |
| 173 | A -> V: ALMOST NO LOSS OF |
| | ACTIVITY. |
| 185 | W -> R: NO LOSS OF ACTIVITY. |
| 204 | S -> P: 87% LOSS OF ACTIVITY. |
| 210 | R -> K, E, Q, T, A, P: LOSS OF |
| | ACTIVITY. |
| 212 | M -> T, N, S, R: LOSS OF ACTIVITY. |

[0735] Protein Interleukin-6 precursor (SEQ ID NO:193) localization is believed to be Secreted.

[0736] Serum levels of IL-6 were significantly higher in women with endometriosis than in controls (P<0.001), with highest levels seen in women with chocolate cysts (Wieser et al, J Soc Gynecol Investig. 2003 January; 10(1):32-6). Variants of this cluster are suitable as diagnostic markers for endometriosis.

[0737] The previously known protein also has the following indication(s) and/or potential therapeutic use(s): Chemotherapy-induced injury; Cancer, sarcoma, Kaposi's; Cancer, myeloma; Chemotherapy-induced injury, bone marrow, thrombocytopenia; Thrombocytopenia; Infection, HIV/AIDS; Chemotherapy-induced injury, bone marrow, neutropenia; Cancer, breast; Cancer, colorectal; Cancer, leukaemia, acute myelogenous; Cancer, melanoma; Myelodysplastic syndrome; Hepatic dysfunction. It has been investigated for clinical/therapeutic use in humans, for example as a target for an antibody or small molecule, and/or as a direct therapeutic; available information related to these investigations is as follows. Potential pharmaceutically related or therapeutically related activity or activities of the previously known protein are as follows: Interleukin 1 antagonist; Interleukin 2 agonist; Interleukin 6 modulator. A therapeutic role for a protein represented by the cluster has been predicted. The cluster was assigned this field because there was information in the drug database or the public databases (e.g., described herein above) that this protein, or part thereof, is used or can be used for a potential therapeutic indication: Antiarthritic, immunological; Radio/chemoprotective; Anticancer; Cytokine; Haematological; Anti-inflammatory; Antianaemic; Antiviral, interferon; Anabolic; Hepatoprotective.

[0738] The following GO Annotation(s) apply to the previously known protein. The following annotation(s) were found: skeletal development; acute-phase response; humoral defense mechanism; cell surface receptor linked signal transduction; cell-cell signaling; developmental processes; cell proliferation; positive control of cell proliferation; negative control of cell proliferation, which are annotation(s) related to Biological Process; cytokine; interleukin-6 receptor ligand, which are annotation(s) related to Molecular Function; and extracellular space, which are annotation(s) related to Cellular Component.

[0739] The GO assignment relies on information from one or more of the SwissProt/TremBl Protein knowledgebase, available from <http://www.expasy.ch/sprot/>; or Locuslink, available from <http://www.ncbi.nlm.nih.gov/projects/LocusLink/>.

[0740] As noted above, cluster S56892 features 4 transcript(s), which were listed in Table 1 above. These transcript(s) encode for protein(s) which are variant(s) of protein Interleukin-6 precursor (SEQ ID NO:193). A description of each variant protein according to the present invention is now provided.

[0741] Variant protein S56892_PEA_{—}1_P2 (SEQ ID NO:194) according to the present invention has an amino acid sequence as given at the end of the application; it is encoded by transcript(s) S56892_PEA_{—}1_T3 (SEQ ID NO:169). An alignment is given to the known protein (Interleukin-6 precursor (SEQ ID NO:193)) at the end of the application. One or more alignments to one or more previously published protein sequences are given at the end of the application. A brief description of the relationship of the variant protein according to the present invention to each such aligned protein is as follows:

[0742] Comparison report between S56892_PEA_{—}1_P2 (SEQ ID NO:194) and IL6_HUMAN (SEQ ID NO:193):

[0743] 1. An isolated chimeric polypeptide encoding for S56892_PEA_{—}1_P2 (SEQ ID NO:194), comprising a first amino acid sequence being at least 70%, optionally at least 80%, preferably at least 85%, more preferably at least 90% and most preferably at least 95% homologous to a polypeptide having the sequence MNSFSTSKCRKSLALELPAAVEPCVREGCVAQGGLAGGQQQRQAPSCAVSSPLRSLPS GTG (SEQ ID NO:491) corresponding to amino acids 1-61 of S56892_PEA_{—}1_P2 (SEQ ID NO:194), and a second amino acid sequence being at least 90% homologous to AFGPVAFSLGLLLVLPAAFPAPVPPGEDSKDVAAPHRQPLTSSERIDKQIRYILDGISALR KETCNKSNMCESSKEALAENNLNLPKMAEKDGCFQSGFNEETCLVKIITGLLEFEVYLE YLQNRFESSEEQARAVQMSTKVLIQFLQKKAKNLDAITTPDPTTNASLLTKLQAQNQW LQDMTTHLILRSFKEFLQSSLRALRQM corresponding to amino acids 8-212 of IL6_HUMAN (SEQ ID NO:193), which also corresponds to amino acids 62-266 of S56892_PEA_{—}1_P2 (SEQ ID NO:194), wherein said first amino acid sequence and second amino acid sequence are contiguous and in a sequential order.

[0744] 2. An isolated polypeptide encoding for a head of S56892_PEA_{—}1_P2 (SEQ ID NO:194), comprising a polypeptide being at least 70%, optionally at least about 80%, preferably at least about 85%, more preferably at least about 90% and most preferably at least about 95% homologous to the sequence MNSFSTSKCRKSLALELPAAVEPCVREGCVAQGGLAGGQQQRQAPSCAVSSPLRSLPS GTG (SEQ ID NO:491) of S56892_PEA_{—}1_P2 (SEQ ID NO:194).

[0745] The location of the variant protein was determined according to results from a number of different software programs and analyses, including analyses from SignalP and other specialized programs. The variant protein is believed to be located as follows with regard to the cell: intracellularly. The protein localization is believed to be intracellularly because only one of the two trans-membrane region prediction programs (Tmpred: 1, Tmhmm: 0) Has predicted that this protein has a trans-membrane region. In addition both signal-peptide prediction programs predict that this protein is a non-secreted protein.

[0746] Variant protein S56892_PEA_{—}1_P2 (SEQ ID NO:194) also has the following non-silent SNPs (Single Nucleotide Polymorphisms) as listed in Table 5, (given according to their position(s) on the amino acid sequence, with the alternative amino acid(s) listed; the last column indicates whether the SNP is known or not; the presence of known SNPs in variant protein S56892_PEA_{—}1_P2 (SEQ ID NO:194) Sequence provides support for the deduced sequence of this variant protein according to the present invention).

TABLE 5
Amino acid mutations

| SNP position(s) | | |
|---|---|---|
| on amino acid | Alternative | Previously |
| sequence | amino acid(s) | known SNP? |
| 224 | T -> | No |
| 231 | T -> A | No |
| 251 | S -> | No |

[0747] The glycosylation sites of variant protein S56892_PEA_{—}1_P2 (SEQ ID NO:194), as compared to the known protein Interleukin-6 precursor (SEQ ID NO:193), are described in Table 6 (given according to their position(s) on the amino acid sequence in the first column; the second column indicates whether the glycosylation site is present in the variant protein; and the last column indicates whether the position is different on the variant protein).

TABLE 6
Glycosylation site(s)

| Position(s) on known amino | Present in | Position in |
|---|---|---|
| acid sequence | variant protein? | variant protein? |
| 73 | yes | 127 |

[0748] Variant protein S56892_PEA_{—}1_P2 (SEQ ID NO:194) is encoded by the following transcript(s): S56892_PEA_{—}1_T3 (SEQ ID NO:169), for which the sequence(s) is/are given at the end of the application. The coding portion of transcript S56892_PEA_{—}1_T3 (SEQ ID NO:169) is shown in bold; this coding portion starts at position 458 and ends at position 1255. The transcript also has the following SNPs as listed in Table 7 (given according to their position on the nucleotide sequence, with the alternative nucleic acid listed; the last column indicates whether the SNP is known or not; the presence of known SNPs in variant protein S56892_PEA_{—}1_P2 (SEQ ID NO:194) Sequence provides support for the deduced sequence of this variant protein according to the present invention).

TABLE 7
Nucleic acid SNPs

| SNP position on nucleotide | Alternative | Previously |
|---|---|---|
| sequence | nucleic acid | known SNP? |
| 407 | A -> T | No |
| 408 | G -> T | No |
| 706 | A -> G | No |
| 1128 | C -> | No |
| 1148 | A -> G | No |
| 1209 | G -> | No |
| 1222 | C -> T | No |
| 1594 | -> A | No |
| 1594 | -> T | No |

[0749] Variant protein S56892-PEA_{—}1_P8 (SEQ ID NO:195) according to the present invention has an amino acid sequence as given at the end of the application; it is encoded by transcript(s) S56892_PEA_{—}1_T9 (SEQ ID NO:170). An alignment is given to the known protein (Interleukin-6 precursor (SEQ ID NO:193)) at the end of the application. One or more alignments to one or more previously published protein sequences are given at the end of the application. A brief description of the relationship of the variant protein according to the present invention to each such aligned protein is as follows:

[0750] Comparison report between S56892_PEA_{—}1_P8 (SEQ ID NO:195) and IL6_HUMAN (SEQ ID NO:193):

[0751] 1. An isolated chimeric polypeptide encoding for S56892_PEA_{—}1_P8 (SEQ ID NO:195), comprising a first amino acid sequence being at least 90% homologous to MNSFSTSAFGPVAFSLGLLLVLPAAFPAPVPPGEDSKDVAAPHRQPLTSSERIDKQIRYIL DGISALRKETCNKSNMCESSKEALAENNLNLPKMAEKDGCFQSGFNEETCLVKIITGLL EFEVYLEYLQNRFESSEEQARAVQMSTKVLIQFLQKK corresponding to amino acids 1-157 of IL6_HUMAN (SEQ ID NO:193), which also corresponds to amino acids 1-157 of S56892_PEA_{—}1_P8 (SEQ ID NO:195), and a second amino acid sequence being at least 70%, optionally at least 80%, preferably at least 85%, more preferably at least 90% and most preferably at least 95% homologous to a polypeptide having the sequence VGVSSFPQLGVGEDRLKDSVLDNSGMQCHFQKRRLHVNKRV (SEQ ID NO:492) corresponding to amino acids 158-198 of S56892_PEA_{—}1_P8 (SEQ ID NO:195), wherein said first amino acid sequence and second amino acid sequence are contiguous and in a sequential order.

[0752] 2. An isolated polypeptide encoding for a tail of S56892_PEA_{—}1_P8 (SEQ ID NO:195), comprising a polypeptide being at least 70%, optionally at least about 80%, preferably at least about 85%, more preferably at least about 90% and most preferably at least about 95% homologous to the sequence VGVSSFPQLGVGEDRLKDSVLDNSGMQCHFQKRRLHVNKRV (SEQ ID NO:492) in S56892_PEA_{—}1_P8 (SEQ ID NO:195).

[0753] The location of the variant protein was determined according to results from a number of different software programs and analyses, including analyses from SignalP and other specialized programs. The variant protein is believed to be located as follows with regard to the cell: secreted. The protein localization is believed to be secreted because both signal-peptide prediction programs predict that this protein has a signal peptide, and neither trans-membrane region prediction program predicts that this protein has a trans-membrane region.

[0754] The glycosylation sites of variant protein S56892_PEA_{—}1_P8 (SEQ ID NO:195), as compared to the known protein Interleukin-6 precursor (SEQ ID NO:193), are described in Table 8 (given according to their position(s) on the amino acid sequence in the first column; the second column indicates whether the glycosylation site is present in the variant protein; and the last column indicates whether the position is different on the variant protein).

TABLE 8
Glycosylation site(s)

| Position(s) on known amino | Present in | Position in |
|---|---|---|
| acid sequence | variant protien? | variant protein? |
| 73 | yes | 73 |

[0755] Variant protein S56892_PEA_{—}1_P8 (SEQ ID NO:195) is encoded by the following transcript(s): S56892_PEA_{—}1_T9 (SEQ ID NO:170), for which the sequence(s) is/are given at the end of the application. The coding portion of transcript S56892_PEA_{—}1_T9 (SEQ ID NO:170) is shown in bold; this coding portion starts at position 458 and ends at position 1051. The transcript also has the following SNPs as listed in Table 9 (given according to their position on the nucleotide sequence, with the alternative nucleic acid listed; the last column indicates whether the SNP is known or not; the presence of known SNPs in variant protein S56892_PEA_{—}1_P8 (SEQ ID NO:195) Sequence provides support for the deduced sequence of this variant protein according to the present invention).

TABLE 9
Nucleic acid SNPs

| SNP position on nucleotide | Alternative | Previously |
|---|---|---|
| sequence | nucleic acid | known SNP? |
| 407 | A -> T | No |
| 408 | G -> T | No |
| 544 | A -> G | No |
| 1798 | A -> G | Yes |
| 2257 | G -> A | Yes |
| 2711 | C -> | No |
| 2731 | A -> G | No |
| 2792 | G -> | No |
| 2805 | C -> T | No |
| 3177 | -> A | No |
| 3177 | -> T | No |

[0756] Variant protein S56892_PEA_{—}1_P9 (SEQ ID NO:196) according to the present invention has an amino acid sequence as given at the end of the application; it is encoded by transcript(s) S56892_PEA_{—}1_T10 (SEQ ID NO:171). An alignment is given to the known protein (Interleukin-6 precursor (SEQ ID NO:193)) at the end of the application. One or more alignments to one or more previously published protein sequences are given at the end of the application. A brief description of the relationship of the variant protein according to the present invention to each such aligned protein is as follows:

[0757] Comparison report between S56892_PEA_{—}1_P9 (SEQ ID NO:196) and IL6_HUMAN (SEQ ID NO:193):

[0758] 1. An isolated chimeric polypeptide encoding for S56892_PEA_{—}1_P9 (SEQ ID NO:196), comprising a first amino acid sequence being at least 90% homologous to MNSFSTSAFGPVAFSLGLLLVLPAAFPAPVPPGEDSKDVAAPHRQPLTSSERIDKQIRYIL DGISALRKETCNKSNMCESSKEALAENNLNLPKMAEKDGCFQSGFNE corresponding to amino acids 1-108 of IL6_HUMAN (SEQ ID NO:193), which also corresponds to amino acids 1-108 of S56892_PEA_{—}1_P9 (SEQ ID NO:196), and a second amino acid sequence being at least 90% homologous to AKNLDAITTPDPTTNASLLTKLQAQNQWLQDMTTHLILRSFKEFLQSSLRALRQM corresponding to amino acids 158-212 of IL6_HUMAN (SEQ ID NO:193), which also corresponds to amino acids 109-163 of S56892_PEA_{—}1_P9 (SEQ ID NO:196), wherein said first amino acid sequence and second amino acid sequence are contiguous and in a sequential order.

[0759] 2. An isolated chimeric polypeptide encoding for an edge portion of S56892_PEA_{—}1_P9 (SEQ ID NO:196), comprising a polypeptide having a length “n”, wherein n is at least about 10 amino acids in length, optionally at least about 20 amino acids in length, preferably at least about 30 amino acids in length, more preferably at least about 40 amino acids in length and most preferably at least about 50 amino acids in length, wherein at least two amino acids comprise EA, having a structure as follows: a sequence starting from any of amino acid numbers 108−x to 108; and ending at any of amino acid numbers 109+((n−2)−x), in which x varies from 0 to n−2.

[0760] The location of the variant protein was determined according to results from a number of different software programs and analyses, including analyses from SignalP and other specialized programs. The variant protein is believed to be located as follows with regard to the cell: secreted. The protein localization is believed to be secreted because both signal-peptide prediction programs predict that this protein has a signal peptide, and neither trans-membrane region prediction program predicts that this protein has a trans-membrane region.

[0761] Variant protein S56892_PEA_{—}1_P9 (SEQ ID NO:196) also has the following non-silent SNPs (Single Nucleotide Polymorphisms) as listed in Table 10, (given according to their position(s) on the amino acid sequence, with the alternative amino acid(s) listed; the last column indicates whether the SNP is known or not; the presence of known SNPs in variant protein S56892_PEA_{—}1_P9 (SEQ ID NO:196) Sequence provides support for the deduced sequence of this variant protein according to the present invention).

TABLE 10
Amino acid mutations

| SNP position(s) on amino acid | Alternative amino | Previously |
|---|---|---|
| sequence | acid(s) | known SNP? |
| 121 | T -> | No |
| 128 | T -> A | No |
| 148 | S -> | No |

[0762] The glycosylation sites of variant protein S56892_PEA_{—}1_P9 (SEQ ID NO:196), as compared to the known protein Interleukin-6 precursor (SEQ ID NO:193), are described in Table 11 (given according to their position(s) on the amino acid sequence in the first column; the second column indicates whether the glycosylation site is present in the variant protein; and the last column indicates whether the position is different on the variant protein).

TABLE 11
Glycosylation site(s)

| Position(s) on known amino | Present in | Position in |
|---|---|---|
| acid sequence | variant protein? | variant protein? |
| 73 | yes | 73 |

[0763] Variant protein S56892_PEA_{—}1_P9 (SEQ ID NO:196) is encoded by the following transcript(s): S56892_PEA_{—}1_T10 (SEQ ID NO:171), for which the sequence(s) is/are given at the end of the application. The coding portion of transcript S56892_PEA_{—}1_T10 (SEQ ID NO:171) is shown in bold; this coding portion starts at position 113 and ends at position 601. The transcript also has the following SNPs as listed in Table 12 (given according to their position on the nucleotide sequence, with the alternative nucleic acid listed; the last column indicates whether the SNP is known or not; the presence of known SNPs in variant protein S56892_PEA_{—}1_P9 (SEQ ID NO:196) Sequence provides support for the deduced sequence of this variant protein according to the present invention).

TABLE 12
Nucleic acid SNPs

| SNP position on nucleotide | Alternative | Previously |
|---|---|---|
| sequence | nucleic acid | known SNP? |
| 62 | A -> T | No |
| 63 | G -> T | No |
| 199 | A -> G | No |
| 474 | C -> | No |
| 494 | A -> G | No |
| 555 | G -> | No |
| 568 | C -> T | No |
| 940 | -> A | No |
| 940 | -> T | No |

[0764] Variant protein S56892_PEA_{—}1_P11 (SEQ ID NO:197) according to the present invention has an amino acid sequence as given at the end of the application; it is encoded by transcript(s) S56892_PEA_{—}1_T13 (SEQ ID NO:172). An alignment is given to the known protein (Interleukin-6 precursor (SEQ ID NO:193)) at the end of the application. One or more alignments to one or more previously published protein sequences are given at the end of the application. A brief description of the relationship of the variant protein according to the present invention to each such aligned protein is as follows:

[0765] Comparison report between S56892_PEA_{—}1_P11 (SEQ ID NO:197) and IL6_HUMAN (SEQ ID NO:193):

[0766] 1. An isolated chimeric polypeptide encoding for S56892_PEA_{—}1_P11 (SEQ ID NO:197), comprising a first amino acid sequence being at least 90% homologous to MNSFSTSAFGPVAFSLGLLLVLPAAFPAPVPPGEDSKDVAAPHRQPLTSSERIDKQIRYIL DGISALRKETCNKSN corresponding to amino acids 1-76 of IL6_HUMAN (SEQ ID NO:193), which also corresponds to amino acids 1-76 of S56892_PEA_{—}1_P11 (SEQ ID NO:197), and a second amino acid sequence being at least 70%, optionally at least 80%, preferably at least 85%, more preferably at least 90% and most preferably at least 95% homologous to a polypeptide having the sequence IWLKKMDASNLDSMRRLAW (SEQ ID NO:493) corresponding to amino acids 77-95 of S56892_PEA_{—}1_P11 (SEQ ID NO:197), wherein said first amino acid sequence and second amino acid sequence are contiguous and in a sequential order.

[0767] 2. An isolated polypeptide encoding for a tail of S56892_PEA_{—}1_P11 (SEQ ID NO:197), comprising a polypeptide being at least 70%, optionally at least about 80%, preferably at least about 85%, more preferably at least about 90% and most preferably at least about 95% homologous to the sequence IWLKKMDASNLDSMRRLAW (SEQ ID NO:493) in S56892_PEA_{—}1_P11 (SEQ ID NO:197).

[0768] The location of the variant protein was determined according to results from a number of different software programs and analyses, including analyses from SignalP and other specialized programs. The variant protein is believed to be located as follows with regard to the cell: secreted. The protein localization is believed to be secreted because both signal-peptide prediction programs predict that this protein has a signal peptide, and neither trans-membrane region prediction program predicts that this protein has a trans-membrane region.

[0769] The glycosylation sites of variant protein S56892_PEA_{—}1_P11 (SEQ ID NO:197), as compared to the known protein Interleukin-6 precursor (SEQ ID NO:193), are described in Table 13 (given according to their position(s) on the amino acid sequence in the first column; the second column indicates whether the glycosylation site is present in the variant protein; and the last column indicates whether the position is different on the variant protein).

TABLE 13
Glycosylation site(s)

| Position(s) on known amino | Present in | Position in |
|---|---|---|
| acid sequence | variant protein? | variant protein? |
| 73 | yes | 73 |

[0770] Variant protein S56892_PEA_{—}1_P11 (SEQ ID NO:197) is encoded by the following transcript(s): S56892_PEA_{—}1_T13 (SEQ ID NO:172), for which the sequence(s) is/are given at the end of the application. The coding portion of transcript S56892_PEA_{—}1_T13 (SEQ ID NO:172) is shown in bold; this coding portion starts at position 458 and ends at position 742. The transcript also has the following SNPs as listed in Table 14 (given according to their position on the nucleotide sequence, with the alternative nucleic acid listed; the last column indicates whether the SNP is known or not; the presence of known SNPs in variant protein S56892_PEA_{—}1_P11 (SEQ ID NO:197) Sequence provides support for the deduced sequence of this variant protein according to the present invention).

TABLE 14
Nucleic acid SNPs

| SNP position on nucleotide | Alternative | Previously |
|---|---|---|
| sequence | nucleic acid | known SNP? |
| 407 | A -> T | No |
| 408 | G -> T | No |
| 544 | A -> G | No |
| 914 | C -> | No |
| 934 | A -> G | No |
| 995 | G -> | No |
| 1008 | C -> T | No |
| 1380 | -> A | No |
| 1380 | -> T | No |

[0771] As noted above, cluster S56892 features 20 segment(s), which were listed in Table 2 above and for which the sequence(s) are given at the end of the application. These segment(s) are portions of nucleic acid sequence(s) which are described herein separately because they are of particular interest. A description of each segment according to the present invention is now provided.

[0772] Segment cluster S56892_PEA_{—}1_node_{—}0 (SEQ ID NO:173) according to the present invention is supported by 2 libraries. The number of libraries was determined as previously described. This segment can be found in the following transcript(s): S56892_PEA_{—}1_T3 (SEQ ID NO:169), S56892_PEA_{—}1_T9 (SEQ ID NO:170) and S56892_PEA_{—}1_T13 (SEQ ID NO:172). Table 15 below describes the starting and ending position of this segment on each transcript.

TABLE 15
Segment location on transcripts

| | Segment | Segment |
|---|---|---|
| | starting | ending |
| Transcript name | position | position |
| S56892_PEA_1_T3 (SEQ ID NO: 169) | 1 | 373 |
| S56892_PEA_1_T9 (SEQ ID NO: 170) | 1 | 373 |
| S56892_PEA_1_T13 (SEQ ID | 1 | 373 |
| NO: 172) | | |

[0773] Segment cluster S56892_PEA_{—}1_node_{—}5 (SEQ ID NO:174) according to the present invention is supported by 6 libraries. The number of libraries was determined as previously described. This segment can be found in the following transcript(s): S56892_PEA_{—}1_T3 (SEQ ID NO:169). Table 16 below describes the starting and ending position of this segment on each transcript.

TABLE 16
Segment location on transcripts

| | Segment | Segment |
|---|---|---|
| | starting | ending |
| Transcript name | position | position |
| S56892_PEA_1_T3 (SEQ ID NO: 169) | 477 | 632 |

[0774] Segment cluster S56892_PEA_{—}1_node_{—}10 (SEQ ID NO:175) according to the present invention is supported by 98 libraries. The number of libraries was determined as previously described. This segment can be found in the following transcript(s): S56892_PEA_{—}1_T3 (SEQ ID NO:169), S56892_PEA_{—}1_T9 (SEQ ID NO:170), S56892_PEA_{—}1_T10 (SEQ ID NO:171) and S56892_PEA_{—}1_T13 (SEQ ID NO:172). Table 17 below describes the starting and ending position of this segment on each transcript.

TABLE 17
Segment location on transcripts

| | Segment | Segment |
|---|---|---|
| | starting | ending |
| Transcript name | position | position |
| S56892_PEA_1_T3 (SEQ ID NO: 169) | 708 | 829 |
| S56892_PEA_1_T9 (SEQ ID NO: 170) | 546 | 667 |
| S56892_PEA_1_T10 (SEQ ID | 201 | 322 |
| NO: 171) | | |
| S56892_PEA_1_T13 (SEQ ID | 546 | 667 |
| NO: 172) | | |

[0775] Segment cluster S56892_PEA_{—}1_node_{—}18 (SEQ ID NO:176) according to the present invention is supported by 22 libraries. The number of libraries was determined as previously described. This segment can be found in the following transcript(s): S56892_PEA_{—}1_T9 (SEQ ID NO:170). Table 18 below describes the starting and ending position of this segment on each transcript.

TABLE 18
Segment location on transcripts

| | Segment | Segment |
|---|---|---|
| | starting | ending |
| Transcript name | position | position |
| S56892_PEA_1_T9 (SEQ ID NO: 170) | 929 | 2673 |

[0776] Segment cluster S56892_PEA_{—}1_node_{—}21 (SEQ ID NO:177) according to the present invention is supported by 111 libraries. The number of libraries was determined as previously described. This segment can be found in the following transcript(s): S56892_PEA_{—}1_T3 (SEQ ID NO:169), S56892_PEA_{—}1_T9 (SEQ ID NO:170), S56892_PEA_{—}1_T10 (SEQ ID NO:171) and S56892_PEA_{—}1_T13 (SEQ ID NO:172). Table 19 below describes the starting and ending position of this segment on each transcript.

TABLE 19
Segment location on transcripts

| | Segment | Segment |
|---|---|---|
| | starting | ending |
| Transcript name | position | position |
| S56892_PEA_1_T3 (SEQ ID NO: 169) | 1169 | 1625 |
| S56892_PEA_1_T9 (SEQ ID NO: 170) | 2752 | 3208 |
| S56892_PEA_1_T10 (SEQ ID | 515 | 971 |
| NO: 171) | | |
| S56892_PEA_1_T13 (SEQ ID | 955 | 1411 |
| NO: 172) | | |

[0777] According to an optional embodiment of the present invention, short segments related to the above cluster are also provided. These segments are up to about 120 bp in length, and so are included in a separate description.

[0778] Segment cluster S56892_PEA_{—}1_node_{—}3 (SEQ ID NO:178) according to the present invention is supported by 1 libraries. The number of libraries was determined as previously described. This segment can be found in the following transcript(s): S56892_PEA_{—}1_T10 (SEQ ID NO:171). Table 20 below describes the starting and ending position of this segment on each transcript.

TABLE 20
Segment location on transcripts

| | Segment | Segment |
|---|---|---|
| Transcript name | starting position | ending position |
| S56892_PEA_1_T10 (SEQ ID | 1 | 28 |
| NO: 171) | | |

[0779] Segment cluster S56892_PEA_{—}1_node_{—}4 (SEQ ID NO:179) according to the present invention is supported by 93 libraries. The number of libraries was determined as previously described. This segment can be found in the following transcript(s): S56892_PEA_{—}1_T3 (SEQ ID NO:169), S56892_PEA_{—}1_T9 (SEQ ID NO:170), S56892_PEA_{—}1_T10 (SEQ ID NO:171) and S56892_PEA_{—}1_T13 (SEQ ID NO:172). Table 21 below describes the starting and ending position of this segment on each transcript.

TABLE 21
Segment location on transcripts

| | Segment | Segment |
|---|---|---|
| | starting | ending |
| Transcript name | position | position |
| S56892_PEA_1_T3 (SEQ ID NO: 169) | 374 | 476 |
| S56892_PEA_1_T9 (SEQ ID NO: 170) | 374 | 476 |
| S56892_PEA_1_T10 (SEQ ID | 29 | 131 |
| NO: 171) | | |
| S56892_PEA_1_T13 (SEQ ID | 374 | 476 |
| NO: 172) | | |

[0780] Segment cluster S56892_PEA_{—}1_node_{—}6 (SEQ ID NO:180) according to the present invention can be found in the following transcript(s): S56892_PEA_{—}1_T3 (SEQ ID NO:169). Table 22 below describes the starting and ending position of this segment on each transcript.

TABLE 22
Segment location on transcripts

| | Segment | Segment |
|---|---|---|
| | starting | ending |
| Transcript name | position | position |
| S56892_PEA_1_T3 (SEQ ID NO: 169) | 633 | 638 |

[0781] Segment cluster S56892_PEA_{—}1_node_{—}7 (SEQ ID NO:181) according to the present invention can be found in the following transcript(s): S56892_PEA_{—}1_T3 (SEQ ID NO:169), S56892_PEA_{—}1_T9 (SEQ ID NO:170), S56892_PEA_{—}1_T10 (SEQ ID NO:171) and S56892_PEA_{—}1_T13 (SEQ ID NO:172). Table 23 below describes the starting and ending position of this segment on each transcript.

TABLE 23
Segment location on transcripts

| | Segment | Segment |
|---|---|---|
| | starting | ending |
| Transcript name | position | position |
| S56892_PEA_1_T3 (SEQ ID NO: 169) | 639 | 657 |
| S56892_PEA_1_T9 (SEQ ID NO: 170) | 477 | 495 |
| S56892_PEA_1_T10 (SEQ ID | 132 | 150 |
| NO: 171) | | |
| S56892_PEA_1_T13 (SEQ ID | 477 | 495 |
| NO: 172) | | |

[0782] Segment cluster S56892_PEA_{—}1_node_{—}8 (SEQ ID NO:182) according to the present invention is supported by 89 libraries. The number of libraries was determined as previously described. This segment can be found in the following transcript(s): S56892_PEA_{—}1_T3 (SEQ ID NO:169), S56892_PEA_{—}1_T9 (SEQ ID NO:170), S56892_PEA_{—}1_T10 (SEQ ID NO:171) and S56892_PEA_{—}1_T13 (SEQ ID NO:172). Table 24 below describes the starting and ending position of this segment on each transcript.

TABLE 24
Segment location on transcripts

| | Segment | Segment |
|---|---|---|
| | starting | ending |
| Transcript name | position | position |
| S56892_PEA_1_T3 (SEQ ID NO: 169) | 658 | 693 |
| S56892_PEA_1_T9 (SEQ ID NO: 170) | 496 | 531 |
| S56892_PEA_1_T10 (SEQ ID | 151 | 186 |
| NO: 171) | | |
| S56892_PEA_1_T13 (SEQ ID | 496 | 531 |
| NO: 172) | | |

[0783] Segment cluster S56892_PEA_{—}1_node_{—}9 (SEQ ID NO:183) according to the present invention can be found in the following transcript(s): S56892_PEA_{—}1_T3 (SEQ ID NO:169), S56892_PEA_{—}1_T9 (SEQ ID NO:170), S56892_PEA_{—}1_T10 (SEQ ID NO:171) and S56892_PEA_{—}1_T13 (SEQ ID NO:172). Table 25 below describes the starting and ending position of this segment on each transcript.

TABLE 25
Segment location on transcripts

| | Segment | Segment |
|---|---|---|
| | starting | ending |
| Transcript name | position | position |
| S56892_PEA_1_T3 (SEQ ID NO: 169) | 694 | 707 |
| S56892_PEA_1_T9 (SEQ ID NO: 170) | 532 | 545 |
| S56892_PEA_1_T10 (SEQ ID | 187 | 200 |
| NO: 171) | | |
| S56892_PEA_1_T13 (SEQ ID | 532 | 545 |
| NO: 172) | | |

[0784] Segment cluster S56892_PEA_{—}1_node_{—}12 (SEQ ID NO:184) according to the present invention can be found in the following transcript(s): S56892_PEA_{—}1_T3 (SEQ ID NO:169), S56892_PEA_{—}1_T9 (SEQ ID NO:170), S56892_PEA_{—}1_T10 (SEQ ID NO:171) and S56892_PEA_{—}1_T13 (SEQ ID NO:172). Table 26 below describes the starting and ending position of this segment on each transcript.

TABLE 26
Segment location on transcripts

| | Segment | |
|---|---|---|
| | starting | Segment |
| Transcript name | position | ending position |
| S56892_PEA_1_T3 (SEQ ID NO: 169) | 830 | 849 |
| S56892_PEA_1_T9 (SEQ ID NO: 170) | 668 | 687 |
| S56892_PEA_1_T10 (SEQ ID | 323 | 342 |
| NO: 171) | | |
| S56892_PEA_1_T13 (SEQ ID | 668 | 687 |
| NO: 172) | | |

[0785] Segment cluster S56892_PEA_{—}1_node_{—}13 (SEQ ID NO:185) according to the present invention is supported by 70 libraries. The number of libraries was determined as previously described. This segment can be found in the following transcript(s): S56892_PEA_{—}1_T3 (SEQ ID NO:169), S56892_PEA_{—}1_T9 (SEQ ID NO:170) and S56892_PEA_{—}1_T10 (SEQ ID NO:171). Table 27 below describes the starting and ending position of this segment on each transcript.

TABLE 27
Segment location on transcripts

| | Segment | |
|---|---|---|
| | starting | Segment |
| Transcript name | position | ending position |
| S56892_PEA_1_T3 (SEQ ID NO: 169) | 850 | 901 |
| S56892_PEA_1_T9 (SEQ ID NO: 170) | 688 | 739 |
| S56892_PEA_1_T10 (SEQ ID | 343 | 394 |
| NO: 171) | | |

[0786] Segment cluster S56892_PEA_{—}1_node_{—}14 (SEQ ID NO:186) according to the present invention is supported by 64 libraries. The number of libraries was determined as previously described. This segment can be found in the following transcript(s): S56892_PEA_{—}1_T3 (SEQ ID NO:169), S56892_PEA_{—}1_T9 (SEQ ID NO:170), S56892_PEA_{—}1_T10 (SEQ ID NO:171) and S56892_PEA_{—}1_T13 (SEQ ID NO:172). Table 28 below describes the starting and ending position of this segment on each transcript.

TABLE 28
Segment location on transcripts

| | Segment | |
|---|---|---|
| | starting | Segment |
| Transcript name | position | ending position |
| S56892_PEA_1_T3 (SEQ ID NO: 169) | 902 | 943 |
| S56892_PEA_1_T9 (SEQ ID NO: 170) | 740 | 781 |
| S56892_PEA_1_T10 (SEQ ID | 395 | 436 |
| NO: 171) | | |
| S56892_PEA_1_T13 (SEQ ID | 688 | 729 |
| NO: 172) | | |

[0787] Segment cluster S56892_PEA_{—}1_node_{—}16 (SEQ ID NO:187) according to the present invention is supported by 78 libraries. The number of libraries was determined as previously described. This segment can be found in the following transcript(s): S56892_PEA_{—}1_T3 (SEQ ID NO:169), S56892_PEA_{—}1_T9 (SEQ ID NO:170) and S56892_PEA_{—}1_T13 (SEQ ID NO:172). Table 29 below describes the starting and ending position of this segment on each transcript.

TABLE 29
Segment location on transcripts

| | Segment | |
|---|---|---|
| | starting | Segment |
| Transcript name | position | ending position |
| S56892_PEA_1_T3 (SEQ ID NO: 169) | 944 | 1051 |
| S56892_PEA_1_T9 (SEQ ID NO: 170) | 782 | 889 |
| S56892_PEA_1_T13 (SEQ ID | 730 | 837 |
| NO: 172) | | |

[0788] Segment cluster S56892_PEA_{—}1_node_{—}17 (SEQ ID NO:188) according to the present invention is supported by 73 libraries. The number of libraries was determined as previously described. This segment can be found in the following transcript(s): S56892_PEA_{—}1_T3 (SEQ ID NO:169), S56892_PEA_{—}1_T9 (SEQ ID NO:170) and S56892_PEA_{—}1_T13 (SEQ ID NO:172). Table 30 below describes the starting and ending position of this segment on each transcript.

TABLE 30
Segment location on transcripts

| | Segment | |
|---|---|---|
| | starting | Segment |
| Transcript name | position | ending position |
| S56892_PEA_1_T3 (SEQ ID NO: 169) | 1052 | 1090 |
| S56892_PEA_1_T9 (SEQ ID NO: 170) | 890 | 928 |
| S56892_PEA_1_T13 (SEQ ID | 838 | 876 |
| NO: 172) | | |

[0789] Segment cluster S56892_PEA_{—}1_node_{—}19 (SEQ ID NO:189) according to the present invention is supported by 78 libraries. The number of libraries was determined as previously described. This segment can be found in the following transcript(s): S56892_PEA_{—}1_T3 (SEQ ID NO:169), S56892_PEA_{—}1_T9 (SEQ ID NO:170) S56892_PEA_{—}1_T10 (SEQ ID NO:171) and S56892_PEA_{—}1_T13 (SEQ ID NO:172). Table 31 below describes the starting and ending position of this segment on each transcript.

TABLE 31
Segment location on transcripts

| | Segment | |
|---|---|---|
| | starting | Segment |
| Transcript name | position | ending position |
| S56892_PEA_1_T3 (SEQ ID NO: 169) | 1091 | 1124 |
| S56892_PEA_1_T9 (SEQ ID NO: 170) | 2674 | 2707 |
| S56892_PEA_1_T10 (SEQ ID | 437 | 470 |
| NO: 171) | | |
| S56892_PEA_1_T13 (SEQ ID | 877 | 910 |
| NO: 172) | | |

[0790] Segment cluster S56892_PEA_{—}1_node_{—}20 (SEQ ID NO:190) according to the present invention is supported by 83 libraries. The number of libraries was determined as previously described. This segment can be found in the following transcript(s): S56892_PEA_{—}1_T3 (SEQ ID NO:169), S56892_PEA_{—}1_T9 (SEQ ID NO:170), S56892_PEA_{—}1_T10 (SEQ ID NO:171) and S56892_PEA_{—}1_T13 (SEQ ID NO:172). Table 32 below describes the starting and ending position of this segment on each transcript.

TABLE 32
Segment location on transcripts

| | Segment | |
|---|---|---|
| | starting | Segment |
| Transcript name | position | ending position |
| S56892_PEA_1_T3 (SEQ ID NO: 169) | 1125 | 1168 |
| S56892_PEA_1_T9 (SEQ ID NO: 170) | 2708 | 2751 |
| S56892_PEA_1_T10 (SEQ ID | 471 | 514 |
| NO: 171) | | |
| S56892_PEA_1_T13 (SEQ ID | 911 | 954 |
| NO: 172) | | |

[0791] Segment cluster S56892_PEA_{—}1_node_{—}22 (SEQ ID NO:191) according to the present invention can be found in the following transcript(s): S56892_PEA_{—}1_T3 (SEQ ID NO:169), S56892_PEA_{—}1_T9 (SEQ ID NO:170), S56892_PEA_{—}1_T10 (SEQ ID NO:171) and S56892_PEA_{—}1_T13 (SEQ ID NO:172). Table 33 below describes the starting and ending position of this segment on each transcript.

TABLE 33
Segment location on transcripts

| | Segment | |
|---|---|---|
| | starting | Segment |
| Transcript name | position | ending position |
| S56892_PEA_1_T3 (SEQ ID NO: 169) | 1626 | 1638 |
| S56892_PEA_1_T9 (SEQ ID NO: 170) | 3209 | 3221 |
| S56892_PEA_1_T10 (SEQ ID | 972 | 984 |
| NO: 171) | | |
| S56892_PEA_1_T13 (SEQ ID | 1412 | 1424 |
| NO: 172) | | |

[0792] Segment cluster S56892_PEA_{—}1_node_{—}23 (SEQ ID NO:192) according to the present invention is supported by 58 libraries. The number of libraries was determined as previously described. This segment can be found in the following transcript(s): S56892_PEA_{—}1_T3 (SEQ ID NO:169, S56892_PEA_{—}1_T9 (SEQ ID NO:170), S56892_PEA_{—}1_T10 (SEQ ID NO:171) and S56892_PEA_{—}1_T13 (SEQ ID NO:172). Table 34 below describes the starting and ending position of this segment on each transcript.

TABLE 34
Segment location on transcripts

| | Segment | |
|---|---|---|
| | starting | Segment |
| Transcript name | position | ending position |
| S56892_PEA_1_T3 (SEQ ID NO: 169) | 1639 | 1696 |
| S56892_PEA_1_T9 (SEQ ID NO: 170) | 3222 | 3279 |
| S56892_PEA_1_T10 (SEQ ID | 985 | 1042 |
| NO: 171) | | |
| S56892_PEA_1_T13 (SEQ ID | 1425 | 1482 |
| NO: 172) | | |

[0793] Variant protein alignment to the previously known protein:

| Sequence name: IL6_HUMAN (SEQ ID NO:193) | | | |
|---|---|---|---|
| Sequence documentation: | | | |
| Alignment of: S56892_PEA_1_P2 (SEQ ID NO:194) × | | | |
| IL6_HUMAN (SEQ ID NO:193) . . | | | |
| Alignment segment 1/1: | | | |
| Quality: | 1997.00 | Escore: | 0 |
| Matching length: | 207 | Total length: | 207 |
| Matching Percent | 99.52 | Matching Percent | 99.52 |
| Similarity: | | Identity: | |
| Total Percent | 99.52 | Total Percent | 99.52 |
| Similarity: | | Identity: | |
| Gaps: | 0 | | |

| Alignment: | | |
|---|---|---|
| | . . . . . | |
| 60 | TGAFGPVAFSLGLLLVLPAAFPAPVPPGEDSKDVAAPHRQPLTSSERIDK | 109 |
| | \| \|\|\|\|\|\|\|\|\|\|\|\|\|\|\|\|\|\|\|\|\|\|\|\|\|\|\|\|\|\|\|\|\|\|\|\|\|\|\|\|\|\|\|\|\|\|\|\| | |
| 6 | TSAFGPVAFSLGLLLVLPAAFPAPVPPGEDSKDVAAPHRQPLTSSERIDK | 55 |
| | . . . . . | |
| 110 | QIRYILDGISALRKETCNKSNMCESSKEALAENNLNLPKMAEKDGCFQSG | 159 |
| | \|\|\|\|\|\|\|\|\|\|\|\|\|\|\|\|\|\|\|\|\|\|\|\|\|\|\|\|\|\|\|\|\|\|\|\|\|\|\|\|\|\|\|\|\|\|\|\|\|\| | |
| 56 | QIRYILDGISALRKETCNKSNMCESSKEALAENNLNLPKMAEKDGCFQSG | 105 |
| | . . . . . | |
| 160 | FNEETCLVKIITGLLEFEVYLEYLQNRFESSEEQARAVQMSTKVLIQFLQ | 209 |
| | \|\|\|\|\|\|\|\|\|\|\|\|\|\|\|\|\|\|\|\|\|\|\|\|\|\|\|\|\|\|\|\|\|\|\|\|\|\|\|\|\|\|\|\|\|\|\|\|\|\| | |
| 106 | FNEETCLVKIITGLLEFEVYLEYLQNRFESSEEQARAVQMSTKVLIQFLQ | 155 |
| | . . . . . | |
| 210 | KKAKNLDAITTPDPTTNASLLTKLQAQNQWLQDMTTHLILRSFKEFLQSS | 259 |
| | \|\|\|\|\|\|\|\|\|\|\|\|\|\|\|\|\|\|\|\|\|\|\|\|\|\|\|\|\|\|\|\|\|\|\|\|\|\|\|\|\|\|\|\|\|\|\|\|\|\| | |
| 156 | KKAKNLDAITTPDPTTNASLLTKLQAQNQWLQDMTTHLILRSFKEFLQSS | 205 |
| 260 | LRALRQM | 266 |
| | \|\|\|\|\|\|\| | |
| 206 | LRALRQM | 212 |

| Sequence name: IL6_HUMAN (SEQ ID NO:193) | | | |
|---|---|---|---|
| Sequence documentation: | | | |
| Alignment of: S56892_PEA_1_P8 (SEQ ID NO:195) × | | | |
| IL6_HUMAN (SEQ ID NO:193) . . | | | |
| Alignment segment 1/1: | | | |
| Quality: | 1526.00 | Escore: | 0 |
| Matching length: | 157 | Total length: | 157 |
| Matching Percent | 100.00 | Matching Percent | 100.00 |
| Similarity: | | Identity: | |
| Total Percent | 100.00 | Total Percent | 100.00 |
| Similarity: | | Identity: | |
| Gaps: | 0 | | |

| Alignment: | | |
|---|---|---|
| | . . . . . | |
| 1 | MNSFSTSAFGPVAFSLGLLLVLPAAFPAPVPPGEDSKDVAAPHRQPLTSS | 50 |
| | \|\|\|\|\|\|\|\|\|\|\|\|\|\|\|\|\|\|\|\|\|\|\|\|\|\|\|\|\|\|\|\|\|\|\|\|\|\|\|\|\|\|\|\|\|\|\|\|\|\| | |
| 1 | MNSFSTSAFGPVAFSLGLLLVLPAAFPAPVPPGEDSKDVAAPHRQPLTSS | 50 |
| | . . . . . | |
| 51 | ERIDKQIRYILDGISALRKETCNKSNMCESSKEALAENNLNLPKMAEKDG | 100 |
| | \|\|\|\|\|\|\|\|\|\|\|\|\|\|\|\|\|\|\|\|\|\|\|\|\|\|\|\|\|\|\|\|\|\|\|\|\|\|\|\|\|\|\|\|\|\|\|\|\|\| | |
| 51 | ERIDKQIRYILDGISALRKETCNKSNMCESSKEALAENNLNLPKMAEKDG | 100 |
| | . . . . . | |
| 101 | CFQSGFNEETCLVKIITGLLEFEVYLEYLQNRFESSEEQARAVQMSTKVL | 150 |
| | \|\|\|\|\|\|\|\|\|\|\|\|\|\|\|\|\|\|\|\|\|\|\|\|\|\|\|\|\|\|\|\|\|\|\|\|\|\|\|\|\|\|\|\|\|\|\|\|\|\| | |
| 101 | CFQSGFNEETCLVKIITGLLEFEVYLEYLQNRFESSEEQARAVQMSTKVL | 150 |
| 151 | IQFLQKK | 157 |
| | \|\|\|\|\|\|\| | |
| 151 | IQFLQKK | 157 |

| Sequence name: IL6_HUMAN (SEQ ID NO:193) | | | |
|---|---|---|---|
| Sequence documentation: | | | |
| Alignment of: S56892_PEA_1_P9 (SEQ ID NO:196) × | | | |
| IL6_HUMAN (SEQ ID NO:193) . . | | | |
| Alignment segment 1/1: | | | |
| Quality: | 1490.00 | Escore: | 0 |
| Matching length: | 163 | Total length: | 212 |
| Matching Percent | 100.00 | Matching Percent | 100.00 |
| Similarity: | | Identity: | |
| Total Percent | 76.89 | Total Percent | 76.89 |
| Similarity: | | Identity: | |
| Gaps: | 1 | | |

| Alignment: | | |
|---|---|---|
| | . . . . . | |
| 1 | MNSFSTSAFGPVAFSLGLLLVLPAAFPAPVPPGEDSKDVAAPHRQPLTSS | 50 |
| | \|\|\|\|\|\|\|\|\|\|\|\|\|\|\|\|\|\|\|\|\|\|\|\|\|\|\|\|\|\|\|\|\|\|\|\|\|\|\|\|\|\|\|\|\|\|\|\|\|\| | |
| 1 | MNSFSTSAFGPVAFSLGLLLVLPAAFPAPVPPGEDSKDVAAPHRQPLTSS | 50 |
| | . . . . . | |
| 51 | ERIDKQIRYILDGISALRKETCNKSNMCESSKEALAENNLNLPKMAEKDG | 100 |
| | \|\|\|\|\|\|\|\|\|\|\|\|\|\|\|\|\|\|\|\|\|\|\|\|\|\|\|\|\|\|\|\|\|\|\|\|\|\|\|\|\|\|\|\|\|\|\|\|\|\| | |
| 51 | ERIDKQIRYILDGISALRKETCNKSNMCESSKEALAENNLNLPKMAEKDG | 100 |
| | . . . . . | |
| 101 | CFQSGFNE.......................................... | 108 |
| | \|\|\|\|\|\|\|\|\|\|\|\|\|\|\|\|\|\|\|\|\|\|\|\|\|\|\|\|\|\|\|\|\|\|\|\|\|\|\|\|\|\|\|\|\|\|\|\|\|\| | |
| 101 | CFQSGFNEETCLVKIITGLLEFEVYLEYLQNRFESSEEQARAVQMSTKVL | 150 |
| | . . . . . | |
| 109 | .......AKNLDAITTPDPTTNASLLTKLQAQNQWLQDMTTHLILRSFKE | 151 |
| | \|\|\|\|\|\|\|\|\|\|\|\|\|\|\|\|\|\|\|\|\|\|\|\|\|\|\|\|\|\|\|\|\|\|\|\|\|\|\|\|\|\|\|\|\|\|\|\|\|\| | |
| 151 | IQFLQKKAKNLDAITTPDPTTNASLLTKLQAQNQWLQDMTTHLILRSFKE | 200 |
| | . | |
| 152 | FLQSSLRALRQM | 163 |
| | \|\|\|\|\|\|\|\|\|\|\|\| | |
| 201 | FLQSSLRALRQM | 212 |

| Sequence name: IL6_HUMAN (SEQ ID NO:193) | | | |
|---|---|---|---|
| Sequence documentation: | | | |
| Alignment of: S56892_PEA_1_P11 (SEQ ID NO:197) × | | | |
| IL6_HUMAN (SEQ ID NO:193) . . | | | |
| Alignment segment 1/1: | | | |
| Quality: | 733.00 | Escore: | 0 |
| Matching length: | 77 | Total length: | 77 |
| Matching Percent | 100.00 | Matching Percent | 98.70 |
| Similarity: | | Identity: | |
| Total Percent | 100.00 | Total Percent | 98.70 |
| Similarity: | | Identity: | |
| Gaps: | 0 | | |

| Alignment: | | |
|---|---|---|
| | . . . . . | |
| 1 | MNSFSTSAFGPVAFSLGLLLVLPAAFPAPVPPGEDSKDVAAPHRQPLTSS | 50 |
| | \|\|\|\|\|\|\|\|\|\|\|\|\|\|\|\|\|\|\|\|\|\|\|\|\|\|\|\|\|\|\|\|\|\|\|\|\|\|\|\|\|\|\|\|\|\|\|\|\|\| | |
| 1 | MNSFSTSAFGPVAFSLGLLLVLPAAFPAPVPPGEDSKDVAAPHRQPLTSS | 50 |
| | . . | |
| 51 | ERIDKQIRYILDGISALRKETCNKSNI | 77 |
| | \|\|\|\|\|\|\|\|\|\|\|\|\|\|\|\|\|\|\|\|\|\|\|\|\|\|\|\| | |
| 51 | ERIDKQIRYILDGISALRKETCNKSNM | 77 |

### Description for Cluster HSIGFACI

[0794] Cluster HSIGFACI features 6 transcript(s) and 16 segment(s) of interest, the names for which are given in Tables 1 and 2, respectively, the sequences themselves are given at the end of the application. The selected protein variants are given in table 3.

TABLE 1
Transcripts of interest

| Transcript Name | Sequence ID No. |
|---|---|
| HSIGFACI_PEA_1_T9 | 198 |
| HSIGFACI_PEA_1_T10 | 199 |
| HSIGFACI_PEA_1_T12 | 200 |
| HSIGFACI_PEA_1_T15 | 201 |
| HSIGFACI_PEA_1_T16 | 202 |
| HSIGFACI_PEA_1_T17 | 203 |

[0795] TABLE 2
Segments of interest

| Segment Name | Sequence ID No. |
|---|---|
| HSIGFACI_PEA_1_node_0 | 204 |
| HSIGFACI_PEA_1_node_2 | 205 |
| HSIGFACI_PEA_1_node_6 | 206 |
| HSIGFACI_PEA_1_node_9 | 207 |
| HSIGFACI_PEA_1_node_11 | 208 |
| HSIGFACI_PEA_1_node_14 | 209 |
| HSIGFACI_PEA_1_node_19 | 210 |
| HSIGFACI_PEA_1_node_20 | 211 |
| HSIGFACI_PEA_1_node_21 | 212 |
| HSIGFACI_PEA_1_node_24 | 213 |
| HSIGFACI_PEA_1_node_25 | 214 |
| HSIGFACI_PEA_1_node_26 | 215 |
| HSIGFACI_PEA_1_node_27 | 216 |
| HSIGFACI_PEA_1_node_13 | 217 |
| HSIGFACI_PEA_1_node_22 | 218 |
| HSIGFACI_PEA_1_node_23 | 219 |

[0796] TABLE 3
Proteins of interest

| | Sequence | |
|---|---|---|
| Protein Name | ID No. | Corresponding Transcript(s) |
| HSIGFACI_PEA_1_P5 | 225 | HSIGFACI_PEA_1_T9 (SEQ |
| | | ID NO: 198) |
| HSIGFACI_PEA_1_P2 | 226 | HSIGFACI_PEA_1_T12 |
| | | (SEQ ID NO: 200) |
| HSIGFACI_PEA_1_P6 | 227 | HSIGFACI_PEA_1_T15 |
| | | (SEQ ID NO: 201) |
| HSIGFACI_PEA_1_P1 | 228 | HSIGFACI_PEA_1_T16 |
| | | (SEQ ID NO: 202) |
| HSIGFACI_PEA_1_P7 | 229 | HSIGFACI_PEA_1_T10 |
| | | (SEQ ID NO: 199) |
| HSIGFACI_PEA_1_P8 | 230 | HSIGFACI_PEA_1_T17 |
| | | (SEQ ID NO: 203) |

[0797] These sequences are variants of the known protein Insulin-like growth factor IB precursor (SEQ ID NO:220) (SwissProt accession identifier IGFB_HUMAN; known also according to the synonyms IGF-IB; Somatomedin C), referred to herein as the previously known protein.

[0798] Protein Insulin-like growth factor IB precursor (SEQ ID NO:220) is known or believed to have the following function(s): insulin-like growth factors, isolated from plasma, are structurally and functionally related to insulin but have a much higher growth-promoting activity. The sequence for protein Insulin-like growth factor IB precursor is given at the end of the application, as “Insulin-like growth factor IB precursor amino acid sequence” (SEQ ID NO:220). Known polymorphisms for this sequence are as shown in Table 4.

TABLE 4
Amino acid mutations for Known Protein

| SNP position(s) on | |
|---|---|
| amino acid sequence | Comment |
| 187 | A -> D (in dbSNP: 6213). /FTId = VAR_013945. |

[0799] Protein Insulin-like growth factor IB precursor (SEQ ID NO:220) localization is believed to be Secreted.

[0800] The mean serum IGF I levels of controls and early-stage endometriosis patients were significantly lower than those in the late stage of endometrosis (Gurgan et al, J Reprod Med. 1999 May; 44(5):450-4). Variants of this cluster are suitable as diagnostic markers for endometriosis.

[0801] The previously known protein also has the following indication(s) and/or potential therapeutic use(s): Amyotrophic lateral sclerosis; Neuropathy; Osteoporosis; Wound healing; Cancer; Diabetes; Neuropathy, diabetic. It has been investigated for clinical/therapeutic use in humans, for example as a target for an antibody or small molecule, and/or as a direct therapeutic; available information related to these investigations is as follows. Potential pharmaceutically related or therapeutically related activity or activities of the previously known protein are as follows: Insulin like growth factor 1 agonist; Insulin like growth factor 2 agonist; Insulin like growth factor agonist. A therapeutic role for a protein represented by the cluster has been predicted. The cluster was assigned this field because there was information in the drug database or the public databases (e.g., described herein above) that this protein, or part thereof, is used or can be used for a potential therapeutic indication: Ophthalmological; Growth hormone; Vulnerary; Osteoporosis treatment; Neuroprotective; Antidiabetic; Nutritional supplement; Antiarthritic; Multiple sclerosis treatment; Neurological; Symptomatic antidiabetic.

[0802] The following GO Annotation(s) apply to the previously known protein. The following annotation(s) were found: skeletal development; DNA replication; cell motility; signal transduction; RAS protein signal transduction; muscle development; physiological processes; positive control of cell proliferation; glycolate metabolism, which are annotation(s) related to Biological Process; insulin-like growth factor receptor ligand; hormone; growth factor, which are annotation(s) related to Molecular Function; and extracellular, which are annotation(s) related to Cellular Component.

[0803] The GO assignment relies on information from one or more of the SwissProt/TremBl Protein knowledgebase, available from <http://www.expasy.ch/sprot/>; or Locuslink, available from <http://www.ncbi.nlm.nih.gov/projects/LocusLink/>.

[0804] As noted above, cluster HSIGFACI features 6 transcript(s), which were listed in Table 1 above. These transcript(s) encode for protein(s) which are variant(s) of protein Insulin-like growth factor IB precursor (SEQ ID NO:220). A description of each variant protein according to the present invention is now provided.

[0805] Variant protein HSIGFACI_PEA_{—}1_P5 (SEQ ID NO:225) according to the present invention has an amino acid sequence as given at the end of the application; it is encoded by transcript(s) HSIGFACI_PEA_{—}1_T9 (SEQ ID NO:198). An alignment is given to the known protein (Insulin-like growth factor IB precursor (SEQ ID NO:220)) at the end of the application. One or more alignments to one or more previously published protein sequences are given at the end of the application. A brief description of the relationship of the variant protein according to the present invention to each such aligned protein is as follows:

[0806] Comparison report between HSIGFACI_PEA_{—}1_P5 (SEQ ID NO:225) and Q9NP10 (SEQ ID NO:222):

[0807] 1. An isolated chimeric polypeptide encoding for HSIGFACI_PEA_{—}1_P5 (SEQ ID NO:225), comprising a first amino acid sequence being at least 70%, optionally at least 80%, preferably at least 85%, more preferably at least 90% and most preferably at least 95% homologous to a polypeptide having the sequence MITPTVK (SEQ ID NO:483) corresponding to amino acids 1-7 of HSIGFACI_PEA_{—}1_P5 (SEQ ID NO:225), a second amino acid sequence being at least 90% homologous to MHTMSSSHLFYLALCLLTFTSSATAGPETLCGAELVDALQFVCGDRGFYFNKPTGYGSS SRRAPQTGIVDECCFRSCDLRRLEMYCAPLKPAKSARSVRAQRHTDMPKTQK corresponding to amino acids 1-111 of Q9NP10 (SEQ ID NO:222), which also corresponds to amino acids 8-118 of HSIGFACI_PEA_{—}1_P5 (SEQ ID NO:225), and a third amino acid sequence being at least 70%, optionally at least 80%, preferably at least 85%, more preferably at least 90% and most preferably at least 95% homologous to a polypeptide having the sequence YQPPSTNKNTKSQRRKGSTFEERK (SEQ ID NO:484) corresponding to amino acids 119-142 of HSIGFACI_PEA_{—}1_P5 (SEQ ID NO:225), wherein said first amino acid sequence, second amino acid sequence and third amino acid sequence are contiguous and in a sequential order.

[0808] 2. An isolated polypeptide encoding for a head of HSIGFACI_PEA_{—}1_P5 (SEQ ID NO:225), comprising a polypeptide being at least 70%, optionally at least about 80%, preferably at least about 85%, more preferably at least about 90% and most preferably at least about 95% homologous to the sequence MITPTVK (SEQ ID NO:483) of HSIGFACI_PEA_{—}1_P5 (SEQ ID NO:225).

[0809] 3. An isolated polypeptide encoding for a tail of HSIGFACI_PEA_{—}1_P5 (SEQ ID NO:225), comprising a polypeptide being at least 70%, optionally at least about 80%, preferably at least about 85%, more preferably at least about 90% and most preferably at least about 95% homologous to the sequence YQPPSTNKNTKSQRRKGSTFEERK (SEQ ID NO:484) in HSIGFACI_PEA_{—}1_P5 (SEQ ID NO:225).

[0810] Comparison report between HSIGFACI_PEA_{—}1_P5 (SEQ ID NO:225) and Q13429 (SEQ ID NO:224):

[0811] 1. An isolated chimeric polypeptide encoding for HSIGFACI_PEA_{—}1_P5 (SEQ ID NO:225), comprising a first amino acid sequence being at least 70%, optionally at least 80%, preferably at least 85%, more preferably at least 90% and most preferably at least 95% homologous to a polypeptide having the sequence MITPT (SEQ ID NO:485) corresponding to amino acids 1-5 of HSIGFACI_PEA_{—}1_P5 (SEQ ID NO:225), and a second amino acid sequence being at least 90% homologous to VKMHTMSSSHLFYLALCLLTFTSSATAGPETLCGAELVDALQFVCGDRGFYFNKPTGY GSSSRRAPQTGIVDECCFRSCDLRRLEMYCAPLKPAKSARSVRAQRHTDMPKTQKYQP PSTNKNTKSQRRKGSTFEERK corresponding to amino acids 3-139 of Q13429 (SEQ ID NO:224), which also corresponds to amino acids 6-142 of HSIGFACI_PEA_{—}1_P5 (SEQ ID NO:225), wherein said first amino acid sequence and second amino acid sequence are contiguous and in a sequential order.

[0812] 2. An isolated polypeptide encoding for a head of HSIGFACI_PEA_{—}1_P5 (SEQ ID NO:225), comprising a polypeptide being at least 70%, optionally at least about 80%, preferably at least about 85%, more preferably at least about 90% and most preferably at least about 95% homologous to the sequence MITPT (SEQ ID NO:485) of HSIGFACI_PEA_{—}1_P5 (SEQ ID NO:225).

[0813] Comparison report between HSIGFACI_PEA_{—}1_P5 (SEQ ID NO:225) and IGFB_HUMAN (SEQ ID NO:220):

[0814] 1. An isolated chimeric polypeptide encoding for HSIGFACI_PEA_{—}1_P5 (SEQ ID NO:225), comprising a first amino acid sequence being at least 70%, optionally at least 80%, preferably at least 85%, more preferably at least 90% and most preferably at least 95% homologous to a polypeptide having the sequence MITPT (SEQ ID NO:485) corresponding to amino acids 1-5 of HSIGFACI_PEA_{—}1_P5 (SEQ ID NO:225), a second amino acid sequence being at least 90% homologous to VKMHTMSSSHLFYLALCLLTFTSSATAGPETLCGAELVDALQFVCGDRGFYFNKPTGY GSSSRRAPQTGIVDECCFRSCDLRRLEMYCAPLKPAKSARSVRAQRHTDMPKTQKYQP PSTNKNTKSQRRKG corresponding to amino acids 22-151 of IGFB_HUMAN (SEQ ID NO:220), which also corresponds to amino acids 6-135 of HSIGFACI_PEA_{—}1_P5 (SEQ ID NO:225), and a third amino acid sequence being at least 70%, optionally at least 80%, preferably at least 85%, more preferably at least 90% and most preferably at least 95% homologous to a polypeptide having the sequence STFEERK corresponding to amino acids 136-142 of HSIGFACI_PEA_{—}1_P5 (SEQ ID NO:225), wherein said first amino acid sequence, second amino acid sequence and third amino acid sequence are contiguous and in a sequential order.

[0815] 2. An isolated polypeptide encoding for a head of HSIGFACI_PEA_{—}1_P5 (SEQ ID NO:225), comprising a polypeptide being at least 70%, optionally at least about 80%, preferably at least about 85%, more preferably at least about 90% and most preferably at least about 95% homologous to the sequence MITPT (SEQ ID NO:485) of HSIGFACI_PEA_{—}1_P5 (SEQ ID NO:225).

[0816] 3. An isolated polypeptide encoding for a tail of HSIGFACI_PEA_{—}1_P5 (SEQ ID NO:225), comprising a polypeptide being at least 70%, optionally at least about 80%, preferably at least about 85%, more preferably at least about 90% and most preferably at least about 95% homologous to the sequence STFEERK in HSIGFACI_PEA_{—}1_P5 (SEQ ID NO:225).

[0817] Comparison report between HSIGFACI_PEA_{—}1_P5 (SEQ ID NO:225) and Q14620 (SEQ ID NO:221):

[0818] 1. An isolated chimeric polypeptide encoding for HSIGFACI_PEA_{—}1_P5 (SEQ ID NO:225), comprising a first amino acid sequence being at least 90% homologous to MITPTVKMHTMSSSHLFYLALCLLTFTSSATAGPETLCGAELVDALQFVCGDRGFYFNK PTGYGSSSRRAPQTGIVDECCFRSCDLRRLEMYCAPLKPAKSARSVRAQRHTDMPKTQ K corresponding to amino acids 1-118 of Q14620 (SEQ ID NO:221), which also corresponds to amino acids 1-118 of HSIGFACI_PEA_{—}1_P5 (SEQ ID NO:225), and a second amino acid sequence being at least 70%, optionally at least 80%, preferably at least 85%, more preferably at least 90% and most preferably at least 95% homologous to a polypeptide having the sequence YQPPSTNKNTKSQRRKGSTFEERK (SEQ ID NO:484) corresponding to amino acids 119-142 of HSIGFACI_PEA_{—}1_P5 (SEQ ID NO:225), wherein said first amino acid sequence and second amino acid sequence are contiguous and in a sequential order.

[0819] 2. An isolated polypeptide encoding for a tail of HSIGFACI_PEA_L P5 (SEQ ID NO:225), comprising a polypeptide being at least 70%, optionally at least about 80%, preferably at least about 85%, more preferably at least about 90% and most preferably at least about 95% homologous to the sequence YQPPSTNKNTKSQRRKGSTFEERK (SEQ ID NO:484) in HSIGFACI_PEA_{—}1_P5 (SEQ ID NO:225).

[0820] Comparison report between HSIGFACI_PEA_{—}1_P5 (SEQ ID NO:225) and IGFA_HUMAN (SEQ ID NO:223):

[0821] 1. An isolated chimeric polypeptide encoding for HSIGFACI_PEA_{—}1_P5 (SEQ ID NO:225), comprising a first amino acid sequence being at least 70%, optionally at least 80%, preferably at least 85%, more preferably at least 90% and most preferably at least 95% homologous to a polypeptide having the sequence MITPT (SEQ ID NO:485) corresponding to amino acids 1-5 of HSIGFACI_PEA_{—}1_P5 (SEQ ID NO:225), a second amino acid sequence being at least 90% homologous to VKMHTMSSSHLFYLALCLLTFTSSATAGPETLCGAELVDALQFVCGDRGFYFNKPTGY GSSSRRAPQTGIVDECCFRSCDLRRLEMYCAPLKPAKSARSVRAQRHTDMPKTQK corresponding to amino acids 22-134 of IGFA_HUMAN (SEQ ID NO:223), which also corresponds to amino acids 6-118 of HSIGFACI_PEA_{—}1_P5 (SEQ ID NO:225), and a third amino acid sequence being at least 70%, optionally at least 80%, preferably at least 85%, more preferably at least 90% and most preferably at least 95% homologous to a polypeptide having the sequence YQPPSTNKNTKSQRRKGSTFEERK (SEQ ID NO:484) corresponding to amino acids 119-142 of HSIGFACI_PEA_{—}1_P5 (SEQ ID NO:225), wherein said first amino acid sequence, second amino acid sequence and third amino acid sequence are contiguous and in a sequential order.

[0822] 2. An isolated polypeptide encoding for a head of HSIGFACI_PEA_{—}1_P5 (SEQ ID NO:225), comprising a polypeptide being at least 70%, optionally at least about 80%, preferably at least about 85%, more preferably at least about 90% and most preferably at least about 95% homologous to the sequence MITPT (SEQ ID NO:485) of HSIGFACI_PEA_{—}1_P5 (SEQ ID NO:225).

[0823] 3. An isolated polypeptide encoding for a tail of HSIGFACI_PEA_{—}1_P5 (SEQ ID NO:225), comprising a polypeptide being at least 70%, optionally at least about 80%, preferably at least about 85%, more preferably at least about 90% and most preferably at least about 95% homologous to the sequence YQPPSTNKNTKSQRRKGSTFEERK (SEQ ID NO:484) in HSIGFACI_PEA_{—}1_P5 (SEQ ID NO:225).

[0824] The location of the variant protein was determined according to results from a number of different software programs and analyses, including analyses from SignalP and other specialized programs. The variant protein is believed to be located as follows with regard to the cell: secreted. The protein localization is believed to be secreted because both signal-peptide prediction programs predict that this protein has a signal peptide, and neither trans-membrane region prediction program predicts that this protein has a trans-membrane region.

[0825] Variant protein HSIGFACI_PEA_{—}1_P5 (SEQ ID NO:225) also has the following non-silent SNPs (Single Nucleotide Polymorphisms) as listed in Table 5, (given according to their position(s) on the amino acid sequence, with the alternative amino acid(s) listed; the last column indicates whether the SNP is known or not; the presence of known SNPs in variant protein HSIGFACI_PEA_{—}1_P5 (SEQ ID NO:225) Sequence provides support for the deduced sequence of this variant protein according to the present invention).

TABLE 5
Amino acid mutations

| SNP position(s) on amino acid | Alternative | |
|---|---|---|
| sequence | amino acid(s) | Previously known SNP? |
| 28 | S -> N | No |

[0826] Variant protein HSIGFACI_PEA_{—}1_P5 (SEQ ID NO:225) is encoded by the following transcript(s): HSIGFACI_PEA_{—}1_T9 (SEQ ID NO:198), for which the sequence(s) is/are given at the end of the application. The coding portion of transcript HSIGFACI_PEA_{—}1_T9 (SEQ ID NO:198) is shown in bold; this coding portion starts at position 835 and ends at position 1260. Transcript also has the following SNPs as listed in Table 6 (given according to their position on the nucleotide sequence, with the alternative nucleic acid listed; the last column indicates whether the SNP is known or not; the presence of known SNPs in variant protein HSIGFACI_PEA_{—}1_P5 (SEQ ID NO:225) Sequence provides support for the deduced sequence of this variant protein according to the present invention).

TABLE 6
Nucleic acid SNPs

| SNP position on nucleotide | Alternative | |
|---|---|---|
| sequence | nucleic acid | Previously known SNP? |
| 917 | G -> A | No |
| 942 | G -> A | Yes |
| 1071 | C -> T | Yes |
| 1324 | G -> A | Yes |
| 1403 | A -> G | Yes |
| 1450 | A -> | Yes |
| 1558 | A -> T | Yes |
| 1642 | C -> G | Yes |
| 1905 | T -> A | Yes |
| 2050 | A -> | Yes |
| 2068 | T -> C | Yes |
| 2081 | A -> C | Yes |
| 2139 | A -> T | Yes |
| 2221 | T -> A | Yes |
| 2453 | G -> T | Yes |
| 2500 | T -> A | Yes |
| 2518 | G -> C | Yes |
| 2834 | G -> A | Yes |
| 3015 | T -> G | Yes |
| 3021 | C -> G | Yes |
| 3021 | C -> T | Yes |
| 3050 | C -> A | Yes |
| 3067 | T -> C | Yes |
| 3246 | T -> A | Yes |
| 3563 | T -> G | Yes |
| 3662 | A -> G | Yes |
| 3797 | T -> G | Yes |
| 3950 | T -> C | Yes |
| 4014 | G -> A | Yes |
| 4284 | T -> G | Yes |
| 4421 | A -> G | Yes |
| 4524 | C -> G | No |
| 4547 | T -> G | Yes |
| 4690 | C -> T | Yes |
| 5010 | G -> A | Yes |
| 5018 | G -> A | Yes |
| 5027 | G -> A | Yes |
| 5239 | C -> T | Yes |
| 5267 | T -> G | Yes |
| 5273 | A -> G | Yes |
| 5311 | G -> A | Yes |
| 5713 | T -> G | Yes |
| 5729 | A -> T | Yes |
| 5735 | T -> A | Yes |
| 5839 | T -> C | Yes |
| 5855 | G -> C | Yes |
| 6061 | G -> C | Yes |
| 6505 | T -> G | Yes |
| 6573 | T -> G | Yes |
| 6689 | T -> C | Yes |
| 6764 | G -> A | Yes |
| 6808 | A -> T | Yes |
| 6853 | T -> G | Yes |
| 6912 | G -> A | Yes |
| 6974 | T -> G | Yes |
| 6982 | G -> T | Yes |
| 7205 | T -> G | No |
| 7396 | G -> A | Yes |
| 7475 | C -> T | Yes |
| 7614 | T -> C | Yes |
| 7687 | C -> T | Yes |
| 7736 | G -> C | Yes |
| 7810 | C -> A | Yes |
| 7825 | T -> G | Yes |

[0827] Variant protein HSIGFACI_PEA_{—}1_P2 (SEQ ID NO:226) according to the present invention has an amino acid sequence as given at the end of the application; it is encoded by transcript(s) HSIGFACI_PEA_{—}1_T12 (SEQ ID NO:200). An alignment is given to the known protein (Insulin-like growth factor IB precursor (SEQ ID NO:220)) at the end of the application. One or more alignments to one or more previously published protein sequences are given at the end of the application. A brief description of the relationship of the variant protein according to the present invention to each such aligned protein is as follows:

[0828] Comparison report between HSIGFACI_PEA_{—}1_P2 (SEQ ID NO:226) and IGFA_HUMAN (SEQ ID NO:223):

[0829] 1. An isolated chimeric polypeptide encoding for HSIGFACI_PEA_{—}1_P2 (SEQ ID NO:226), comprising a first amino acid sequence being at least 70%, optionally at least 80%, preferably at least 85%, more preferably at least 90% and most preferably at least 95% homologous to a polypeptide having the sequence MITPT (SEQ ID NO:485) corresponding to amino acids 1-5 of HSIGFACI_PEA_{—}1_P2 (SEQ ID NO:226), and a second amino acid sequence being at least 90% homologous to VKMHTMSSSHLFYLALCLLTFTSSATAGPETLCGAELVDALQFVCGDRGFYFNKPTGY GSSSRRAPQTGIVDECCFRSCDLRRLEMYCAPLKPAKSARSVRAQRHTDMPKTQKEVH LKNASRGSAGNKNYRM (SEQ ID NO:487) corresponding to amino acids 22-153 of IGFA_HUMAN (SEQ ID NO:223), which also corresponds to amino acids 6-137 of HSIGFACI_PEA_{—}1_P2 (SEQ ID NO:226), wherein said first amino acid sequence and second amino acid sequence are contiguous and in a sequential order.

[0830] 2. An isolated polypeptide encoding for a head of HSIGFACI_PEA_{—}1_P2 (SEQ ID NO:226), comprising a polypeptide being at least 70%, optionally at least about 80%, preferably at least about 85%, more preferably at least about 90% and most preferably at least about 95% homologous to the sequence MITPT (SEQ ID NO:485) of HSIGFACI_PEA_{—}1_P2 (SEQ ID NO:226).

[0831] The location of the variant protein was determined according to results from a number of different software programs and analyses, including analyses from SignalP and other specialized programs. The variant protein is believed to be located as follows with regard to the cell: secreted. The protein localization is believed to be secreted because both signal-peptide prediction programs predict that this protein has a signal peptide, and neither trans-membrane region prediction program predicts that this protein has a trans-membrane region.

[0832] Variant protein HSIGFACI_PEA_{—}1_P2 (SEQ ID NO:226) also has the following non-silent SNPs (Single Nucleotide Polymorphisms) as listed in Table 7, (given according to their position(s) on the amino acid sequence, with the alternative amino acid(s) listed; the last column indicates whether the SNP is known or not; the presence of known SNPs in variant protein HSIGFACI_PEA_{—}1_P2 (SEQ ID NO:226) Sequence provides support for the deduced sequence of this variant protein according to the present invention).

TABLE 7
Amino acid mutations

| SNP position(s) on amino acid | Alternative | |
|---|---|---|
| sequence | amino acid(s) | Previously known SNP? |
| 28 | S -> N | No |

[0833] Variant protein HSIGFACI_PEA_{—}1_P2 (SEQ ID NO:226) is encoded by the following transcript(s): HSIGFACI_PEA_{—}1_T12 (SEQ ID NO:200), for which the sequence(s) is/are given at the end of the application. The coding portion of transcript HSIGFACI_PEA_{—}1_T12 (SEQ ID NO:200) is shown in bold; this coding portion starts at position 835 and ends at position 1245. The transcript also has the following SNPs as listed in Table 8 (given according to their position on the nucleotide sequence, with the alternative nucleic acid listed; the last column indicates whether the SNP is known or not; the presence of known SNPs in variant protein HSIGFACI_PEA_{—}1_P2 (SEQ ID NO:226) Sequence provides support for the deduced sequence of this variant protein according to the present invention).

TABLE 8
Nucleic acid SNPs

| SNP position on nucleotide | Alternative | |
|---|---|---|
| sequence | nucleic acid | Previously known SNP? |
| 917 | G -> A | No |
| 942 | G -> A | Yes |
| 1071 | C -> T | Yes |
| 1275 | G -> A | Yes |
| 1354 | A -> G | Yes |
| 1401 | A -> | Yes |

[0834] Variant protein HSIGFACI_PEA_{—}1_P6 (SEQ ID NO: 227) according to the present invention has an amino acid sequence as given at the end of the application; it is encoded by transcript(s) HSIGFACI_PEA_{—}1_T15 (SEQ ID NO:201). An alignment is given to the known protein (Insulin-like growth factor IB precursor (SEQ ID NO:220)) at the end of the application. One or more alignments to one or more previously published protein sequences are given at the end of the application. A brief description of the relationship of the variant protein according to the present invention to each such aligned protein is as follows:

[0835] Comparison report between HSIGFACI_PEA_{—}1_P6 (SEQ ID NO: 227) and IGFA_HUMAN (SEQ ID NO:223):

[0836] 1. An isolated chimeric polypeptide encoding for HSIGFACI_PEA_{—}1_P6 (SEQ ID NO: 227), comprising a first amino acid sequence being at least 90% homologous to MGKISSLPTQLFKCCFCDFLKVKMHTMSSSHLFYLALCLLTFTSSATAGPETLCGAELV DALQFVCGDRGFYFNKPTGYGSSSRRAPQTGIVDECCFRSCDLRRLEMYCAPLKPAKS ARSVRAQRHTDMPKTQK corresponding to amino acids 1-134 of IGFA_HUMAN (SEQ ID NO:223), which also corresponds to amino acids 1-134 of HSIGFACI_PEA_{—}1_P6 (SEQ ID NO: 227), and a second amino acid sequence being at least 70%, optionally at least 80%, preferably at least 85%, more preferably at least 90% and most preferably at least 95% homologous to a polypeptide having the sequence YQPPSTNKNTKSQRRKGWPKTHPGGEQKEGTEASLQIRGKKKEQRREIGSRNAECRGK KGK (SEQ ID NO:486) corresponding to amino acids 135-195 of HSIGFACI_PEA_{—}1_P6 (SEQ ID NO: 227), wherein said first amino acid sequence and second amino acid sequence are contiguous and in a sequential order.

[0837] 2. An isolated polypeptide encoding for a tail of HSIGFACI_PEA_{—}1_P6 (SEQ ID NO: 227), comprising a polypeptide being at least 70%, optionally at least about 80%, preferably at least about 85%, more preferably at least about 90% and most preferably at least about 95% homologous to the sequence YQPPSTNKNTKSQRRKGWPKTHPGGEQKEGTEASLQIRGKKKEQRREIGSRNAECRGK KGK (SEQ ID NO:486) in HSIGFACI_PEA_{—}1_P6 (SEQ ID NO: 227).

[0838] The location of the variant protein was determined according to results from a number of different software programs and analyses, including analyses from SignalP and other specialized programs. The variant protein is believed to be located as follows with regard to the cell: secreted. The protein localization is believed to be secreted because both signal-peptide prediction programs predict that this protein has a signal peptide, and neither trans-membrane region prediction program predicts that this protein has a trans-membrane region.

[0839] Variant protein HSIGFACI_PEA_{—}1_P6 (SEQ ID NO: 227) also has the following non-silent SNPs (Single Nucleotide Polymorphisms) as listed in Table 9, (given according to their position(s) on the amino acid sequence, with the alternative amino acid(s) listed; the last column indicates whether the SNP is known or not; the presence of known SNPs in variant protein HSIGFACI_PEA_{—}1_P6 (SEQ ID NO: 227) Sequence provides support for the deduced sequence of this variant protein according to the present invention).

TABLE 9
Amino acid mutations

| SNP position(s) on amino acid | Alternative | |
|---|---|---|
| sequence | amino acid(s) | Previously known SNP? |
| 2 | G -> E | Yes |
| 44 | S -> N | No |
| 187 | A -> D | Yes |

[0840] Variant protein HSIGFACI_PEA_{—}1_P6 (SEQ ID NO: 227) is encoded by the following transcript(s): HSIGFACI_PEA_{—}1_T15 (SEQ ID NO:201), for which the sequence(s) is/are given at the end of the application. The coding portion of transcript HSIGFACI_PEA_{—}1_T15 (SEQ ID NO:201) is shown in bold; this coding portion starts at position 266 and ends at position 850. The transcript also has the following SNPs as listed in Table 10 (given according to their position on the nucleotide sequence, with the alternative nucleic acid listed; the last column indicates whether the SNP is known or not; the presence of known SNPs in variant protein HSIGFACI_PEA_{—}1_P6 (SEQ ID NO: 227) Sequence provides support for the deduced sequence of this variant protein according to the present invention).

TABLE 10
Nucleic acid SNPs

| SNP position on nucleotide | Alternative | |
|---|---|---|
| sequence | nucleic acid | Previously known SNP? |
| 254 | A -> T | Yes |
| 270 | G -> A | Yes |
| 396 | G -> A | No |
| 421 | G -> A | Yes |
| 550 | C -> T | Yes |
| 825 | C -> A | Yes |
| 1210 | T -> C | Yes |
| 1351 | C -> T | No |

[0841] Variant protein HSIGFACI_PEA_{—}1_P1 (SEQ ID NO:228) according to the present invention has an amino acid sequence as given at the end of the application; it is encoded by transcript(s) HSIGFACI_PEA_{—}1_T16 (SEQ ID NO:202). An alignment is given to the known protein (Insulin-like growth factor IB precursor (SEQ ID NO:220)) at the end of the application. One or more alignments to one or more previously published protein sequences are given at the end of the application. A brief description of the relationship of the variant protein according to the present invention to each such aligned protein is as follows:

[0842] Comparison report between HSIGFACI_PEA_{—}1_P1 (SEQ ID NO:228) and IGFB_HUMAN (SEQ ID NO:220):

[0843] 1. An isolated chimeric polypeptide encoding for HSIGFACI_PEA_{—}1_P1 (SEQ ID NO:228), comprising a first amino acid sequence being at least 90% homologous to MGKISSLPTQLFKCCFCDFLKVKMHTMSSSHLFYLALCLLTFTSSATAGPETLCGAELV DALQFVCGDRGFYFNKPTGYGSSSRRAPQTGIVDECCFRSCDLRRLEMYCAPLKPAKS ARSVRAQRHTDMPKTQK corresponding to amino acids 1-134 of IGFB_HUMAN (SEQ ID NO:220), which also corresponds to amino acids 1-134 of HSIGFACI_PEA_{—}1_P1 (SEQ ID NO:228), and a second amino acid sequence being at least 70%, optionally at least 80%, preferably at least 85%, more preferably at least 90% and most preferably at least 95% homologous to a polypeptide having the sequence EVHLKNASRGSAGNKNYRM (SEQ ID NO:487) corresponding to amino acids 135-153 of HSIGFACI_PEA_{—}1_P1 (SEQ ID NO:228), wherein said first amino acid sequence and second amino acid sequence are contiguous and in a sequential order.

[0844] 2. An isolated polypeptide encoding for a tail of HSIGFACI_PEA_{—}1_P1 (SEQ ID NO:228), comprising a polypeptide being at least 70%, optionally at least about 80%, preferably at least about 85%, more preferably at least about 90% and most preferably at least about 95% homologous to the sequence EVHLKNASRGSAGNKNYRM (SEQ ID NO:487) in HSIGFACI_PEA_{—}1_P1 (SEQ ID NO:228).

[0845] The location of the variant protein was determined according to results from a number of different software programs and analyses, including analyses from SignalP and other specialized programs. The variant protein is believed to be located as follows with regard to the cell: secreted. The protein localization is believed to be secreted because both signal-peptide prediction programs predict that this protein has a signal peptide, and neither trans-membrane region prediction program predicts that this protein has a trans-membrane region.

[0846] Variant protein HSIGFACI_PEA_{—}1_P1 (SEQ ID NO:228) also has the following non-silent SNPs (Single Nucleotide Polymorphisms) as listed in Table 11, (given according to their position(s) on the amino acid sequence, with the alternative amino acid(s) listed; the last column indicates whether the SNP is known or not; the presence of known SNPs in variant protein HSIGFACI_PEA_{—}1_P1 (SEQ ID NO:228) Sequence provides support for the deduced sequence of this variant protein according to the present invention).

TABLE 11
Amino acid mutations

| SNP position(s) on amino acid | | Previously |
|---|---|---|
| sequence | Alternative amino acid(s) | known SNP? |
| 2 | G -> E | Yes |
| 44 | S -> N | No |

[0847] Variant protein HSIGFACI_PEA_{—}1_P1 (SEQ ID NO:228) is encoded by the following transcript(s): HSIGFACI_PEA_{—}1_T16 (SEQ ID NO:202), for which the sequence(s) is/are given at the end of the application. The coding portion of transcript HSIGFACI_PEA_{—}1_T16 (SEQ ID NO:202) is shown in bold; this coding portion starts at position 266 and ends at position 724. The transcript also has the following SNPs as listed in Table 12 (given according to their position on the nucleotide sequence, with the alternative nucleic acid listed; the last column indicates whether the SNP is known or not; the presence of known SNPs in variant protein HSIGFACI_PEA_{—}1_P1 (SEQ ID NO:228) Sequence provides support for the deduced sequence of this variant protein according to the present invention).

TABLE 12
Nucleic acid SNPs

| SNP position on nucleotide | | Previously |
|---|---|---|
| sequence | Alternative nucleic acid | known SNP? |
| 254 | A -> T | Yes |
| 270 | G -> A | Yes |
| 396 | G -> A | No |
| 421 | G -> A | Yes |
| 550 | C -> T | Yes |
| 754 | G -> A | Yes |
| 833 | A -> G | Yes |
| 880 | A -> | Yes |

[0848] Variant protein HSIGFACI_PEA_{—}1_P7 (SEQ ID NO:229) according to the present invention has an amino acid sequence as given at the end of the application; it is encoded by transcript(s) HSIGFACI_PEA_{—}1_T10 (SEQ ID NO:199). An alignment is given to the known protein (Insulin-like growth factor IB precursor (SEQ ID NO:220)) at the end of the application. One or more alignments to one or more previously published protein sequences are given at the end of the application. A brief description of the relationship of the variant protein according to the present invention to each such aligned protein is as follows:

[0849] Comparison report between HSIGFACI_PEA_{—}1_P7 (SEQ ID NO:229) and IGFB_HUMAN (SEQ ID NO:220):

[0850] 1. An isolated chimeric polypeptide encoding for HSIGFACI_PEA_{—}1_P7 (SEQ ID NO:229), comprising a first amino acid sequence being at least 90% homologous to MGKISSLPTQLFKCCFCDFLKVKMHTMSSSHLFYLALCLLTFTSSATAGPETLCGAELV DALQFVCGDRGFYF corresponding to amino acids 1-73 of IGFB_HUMAN (SEQ ID NO:220), which also corresponds to amino acids 1-73 of HSIGFACI_PEA_{—}1_P7 (SEQ ID NO:229), and a second amino acid sequence being at least 70%, optionally at least 80%, preferably at least 85%, more preferably at least 90% and most preferably at least 95% homologous to a polypeptide having the sequence SRKILLKLRSSVARCSGSLLKFQQFERPRQENCLS (SEQ ID NO:488) corresponding to amino acids 74-108 of HSIGFACI_PEA_{—}1_P7 (SEQ ID NO:229), wherein said first amino acid sequence and second amino acid sequence are contiguous and in a sequential order.

[0851] 2. An isolated polypeptide encoding for a tail of HSIGFACI_PEA_{—}1_P7 (SEQ ID NO:229), comprising a polypeptide being at least 70%, optionally at least about 80%, preferably at least about 85%, more preferably at least about 90% and most preferably at least about 95% homologous to the sequence SRKILLKLRSSVARCSGSLLKFQQFERPRQENCLS (SEQ ID NO:488) in HSIGFACI_PEA_{—}1_P7 (SEQ ID NO:229).

[0852] Comparison report between HSIGFACI_PEA_{—}1_P7 (SEQ ID NO:229) and IGFA_HUMAN (SEQ ID NO:223):

[0853] 1. An isolated chimeric polypeptide encoding for HSIGFACI_PEA_{—}1_P7 (SEQ ID NO:229), comprising a first amino acid sequence being at least 90% homologous to MGKISSLPTQLFKCCFCDFLKVKMHTMSSSHLFYLALCLLTFTSSATAGPETLCGAELV DALQFVCGDRGFYF corresponding to amino acids 1-73 of IGFA_HUMAN (SEQ ID NO:223), which also corresponds to amino acids 1-73 of HSIGFACI_PEA_{—}1_P7 (SEQ ID NO:229), and a second amino acid sequence being at least 70%, optionally at least 80%, preferably at least 85%, more preferably at least 90% and most preferably at least 95% homologous to a polypeptide having the sequence SRKILLKLRSSVARCSGSLLKFQQFERPRQENCLS (SEQ ID NO:488) corresponding to amino acids 74-108 of HSIGFACI_PEA_{—}1_P7 (SEQ ID NO:229), wherein said first amino acid sequence and second amino acid sequence are contiguous and in a sequential order.

[0854] 2. An isolated polypeptide encoding for a tail of HSIGFACI_PEA_{—}1_P7 (SEQ ID NO:229), comprising a polypeptide being at least 70%, optionally at least about 80%, preferably at least about 85%, more preferably at least about 90% and most preferably at least about 95% homologous to the sequence SRKILLKLRSSVARCSGSLLKFQQFERPRQENCLS (SEQ ID NO:488) in HSIGFACI_PEA_{—}1_P7 (SEQ ID NO:229).

[0855] The location of the variant protein was determined according to results from a number of different software programs and analyses, including analyses from SignalP and other specialized programs. The variant protein is believed to be located as follows with regard to the cell: secreted. The protein localization is believed to be secreted because both signal-peptide prediction programs predict that this protein has a signal peptide, and neither trans-membrane region prediction program predicts that this protein has a trans-membrane region.

[0856] Variant protein HSIGFACI_PEA_{—}1_P7 (SEQ ID NO:229) also has the following non-silent SNPs (Single Nucleotide Polymorphisms) as listed in Table 13, (given according to their position(s) on the amino acid sequence, with the alternative amino acid(s) listed; the last column indicates whether the SNP is known or not; the presence of known SNPs in variant protein HSIGFACI_PEA_{—}1_P7 (SEQ ID NO:229) Sequence provides support for the deduced sequence of this variant protein according to the present invention).

TABLE 13
Amino acid mutations

| SNP position(s) on amino acid | | Previously |
|---|---|---|
| sequence | Alternative amino acid(s) | known SNP? |
| 2 | G -> E | Yes |
| 44 | S -> N | No |

[0857] Variant protein HSIGFACI_PEA_{—}1_P7 (SEQ ID NO:229) is encoded by the following transcript(s): HSIGFACI_PEA_{—}1_T10 (SEQ ID NO:199), for which the sequence(s) is/are given at the end of the application. The coding portion of transcript HSIGFACI_PEA_{—}1_T10 (SEQ ID NO:199) is shown in bold; this coding portion starts at position 266 and ends at position 589. The transcript also has the following SNPs as listed in Table 14 (given according to their position on the nucleotide sequence, with the alternative nucleic acid listed; the last column indicates whether the SNP is known or not; the presence of known SNPs in variant protein HSIGFACI_PEA_{—}1_P7 (SEQ ID NO:229) Sequence provides support for the deduced sequence of this variant protein according to the present invention).

TABLE 14
Nucleic acid SNPs

| SNP position on nucleotide | | Previously |
|---|---|---|
| sequence | Alternative nucleic acid | known SNP? |
| 254 | A -> T | Yes |
| 270 | G -> A | Yes |
| 396 | G -> A | No |
| 421 | G -> A | Yes |
| 687 | G -> A | Yes |
| 810 | A -> G | Yes |
| 850 | A -> C | Yes |
| 853 | G -> A | Yes |
| 859 | A -> C | Yes |
| 909 | C -> T | Yes |
| 1096 | C -> T | Yes |
| 1300 | G -> A | Yes |
| 1379 | A -> G | Yes |
| 1426 | A -> | Yes |
| 1534 | A -> T | Yes |
| 1618 | C -> G | Yes |
| 1881 | T -> A | Yes |
| 2026 | A -> | Yes |
| 2044 | T -> C | Yes |
| 2057 | A -> C | Yes |
| 2115 | A -> T | Yes |
| 2197 | T -> A | Yes |
| 2429 | G -> T | Yes |
| 2476 | T -> A | Yes |
| 2494 | G -> C | Yes |
| 2810 | G -> A | Yes |
| 2991 | T -> G | Yes |
| 2997 | C -> G | Yes |
| 2997 | C -> T | Yes |
| 3026 | C -> A | Yes |
| 3043 | T -> C | Yes |
| 3222 | T -> A | Yes |
| 3539 | T -> G | Yes |
| 3638 | A -> G | Yes |
| 3773 | T -> G | Yes |
| 3926 | T -> C | Yes |
| 3990 | G -> A | Yes |
| 4260 | T -> G | Yes |
| 4397 | A -> G | Yes |
| 4500 | C -> G | No |
| 4523 | T -> G | Yes |
| 4666 | C -> T | Yes |
| 4986 | G -> A | Yes |
| 4994 | G -> A | Yes |
| 5003 | G -> A | Yes |
| 5215 | C -> T | Yes |
| 5243 | T -> G | Yes |
| 5249 | A -> G | Yes |
| 5287 | G -> A | Yes |
| 5689 | T -> G | Yes |
| 5705 | A -> T | Yes |
| 5711 | T -> A | Yes |
| 5815 | T -> C | Yes |
| 5831 | G -> C | Yes |
| 6037 | G -> C | Yes |
| 6481 | T -> G | Yes |
| 6549 | T -> G | Yes |
| 6665 | T -> C | Yes |
| 6740 | G -> A | Yes |
| 6784 | A -> T | Yes |
| 6829 | T -> G | Yes |
| 6888 | G -> A | Yes |
| 6950 | T -> G | Yes |
| 6958 | G -> T | Yes |
| 7181 | T -> G | No |
| 7372 | G -> A | Yes |
| 7451 | C -> T | Yes |
| 7590 | T -> C | Yes |
| 7663 | C -> T | Yes |
| 7712 | G -> C | Yes |
| 7786 | C -> A | Yes |
| 7801 | T -> G | Yes |

[0858] Variant protein HSIGFACI_PEA_{—}1_P8 (SEQ ID NO:230) according to the present invention has an amino acid sequence as given at the end of the application; it is encoded by transcript(s) HSIGFACI_PEA_{—}1_T17 (SEQ ID NO:203). An alignment is given to the known protein (Insulin-like growth factor IB precursor (SEQ ID NO:220)) at the end of the application. One or more alignments to one or more previously published protein sequences are given at the end of the application. A brief description of the relationship of the variant protein according to the present invention to each such aligned protein is as follows:

[0859] Comparison report between HSIGFACI_PEA_{—}1_P8 (SEQ ID NO:230) and Q9NP10 (SEQ ID NO:222):

[0860] 1. An isolated chimeric polypeptide encoding for HSIGFACI_PEA_{—}1_P8 (SEQ ID NO:230), comprising a first amino acid sequence being at least 70%, optionally at least 80%, preferably at least 85%, more preferably at least 90% and most preferably at least 95% homologous to a polypeptide having the sequence MITPTVK (SEQ ID NO:483) corresponding to amino acids 1-7 of HSIGFACI_PEA_{—}1_P8 (SEQ ID NO:230), a second amino acid sequence being at least 90% homologous to MHTMSSSHLFYLALCLLTFTSSATAGPETLCGAELVDALQFVCGDRGFYF corresponding to amino acids 1-50 of Q9NP10 (SEQ ID NO:222), which also corresponds to amino acids 8-57 of HSIGFACI_PEA_{—}1_P8 (SEQ ID NO:230), and a third amino acid sequence being at least 70%, optionally at least 80%, preferably at least 85%, more preferably at least 90% and most preferably at least 95% homologous to a polypeptide having the sequence SRKILLKLRSSVARCSGSLLKFQQFERPRQENCLS (SEQ ID NO:488) corresponding to amino acids 58-92 of HSIGFACI_PEA_{—}1_P8 (SEQ ID NO:230), wherein said first amino acid sequence, second amino acid sequence and third amino acid sequence are contiguous and in a sequential order.

[0861] 2. An isolated polypeptide encoding for a head of HSIGFACI_PEA_{—}1_P8 (SEQ ID NO:230), comprising a polypeptide being at least 70%, optionally at least about 80%, preferably at least about 85%, more preferably at least about 90% and most preferably at least about 95% homologous to the sequence MITPTVK (SEQ ID NO:483) of HSIGFACI_PEA_{—}1_P8 (SEQ ID NO:230).

[0862] 3. An isolated polypeptide encoding for a tail of HSIGFACI_PEA_{—}1_P8 (SEQ ID NO:230), comprising a polypeptide being at least 70%, optionally at least about 80%, preferably at least about 85%, more preferably at least about 90% and most preferably at least about 95% homologous to the sequence SRKILLKLRSSVARCSGSLLKFQQFERPRQENCLS (SEQ ID NO:488) in HSIGFACI_PEA_{—}1_P8 (SEQ ID NO:230).

[0863] Comparison report between HSIGFACI_PEA_{—}1_P8 (SEQ ID NO:230) and Q13429 (SEQ ID NO:224):

[0864] 1. An isolated chimeric polypeptide encoding for HSIGFACI_PEA_{—}1_P8 (SEQ ID NO:230), comprising a first amino acid sequence being at least 70%, optionally at least 80%, preferably at least 85%, more preferably at least 90% and most preferably at least 95% homologous to a polypeptide having the sequence MITPT (SEQ ID NO:485) corresponding to amino acids 1-5 of HSIGFACI_PEA_{—}1_P8 (SEQ ID NO:230), a second amino acid sequence being at least 90% homologous to VKMHTMSSSHLFYLALCLLTFTSSATAGPETLCGAELVDALQFVCGDRGFYF corresponding to amino acids 3-54 of Q13429 (SEQ ID NO:224), which also corresponds to amino acids 6-57 of HSIGFACI_PEA_{—}1_P8 (SEQ ID NO:230), and a third amino acid sequence being at least 70%, optionally at least 80%, preferably at least 85%, more preferably at least 90% and most preferably at least 95% homologous to a polypeptide having the sequence SRKILLKLRSSVARCSGSLLKFQQFERPRQENCLS (SEQ ID NO:488) corresponding to amino acids 58-92 of HSIGFACI_PEA_{—}1_P8 (SEQ ID NO:230), wherein said first amino acid sequence, second amino acid sequence and third amino acid sequence are contiguous and in a sequential order.

[0865] 2. An isolated polypeptide encoding for a head of HSIGFACI_PEA_{—}1_P8 (SEQ ID NO:230), comprising a polypeptide being at least 70%, optionally at least about 80%, preferably at least about 85%, more preferably at least about 90% and most preferably at least about 95% homologous to the sequence MITPT (SEQ ID NO:485) of HSIGFACI_PEA_{—}1_P8 (SEQ ID NO:230).

[0866] 3. An isolated polypeptide encoding for a tail of HSIGFACI_PEA_{—}1_P8 (SEQ ID NO:230), comprising a polypeptide being at least 70%, optionally at least about 80%, preferably at least about 85%, more preferably at least about 90% and most preferably at least about 95% homologous to the sequence SRKILLKLRSSVARCSGSLLKFQQFERPRQENCLS (SEQ ID NO:488) in HSIGFACI_PEA_{—}1_P8 (SEQ ID NO:230).

[0867] Comparison report between HSIGFACI_PEA_{—}1_P8 (SEQ ID NO:230) and Q14620 (SEQ ID NO:221):

[0868] 1. An isolated chimeric polypeptide encoding for HSIGFACI_PEA_{—}1_P8 (SEQ ID NO:230), comprising a first amino acid sequence being at least 90% homologous to MITPTVKMHTMSSSSHLFYLALCLLTFTSSATAGPETLCGAELVDALQFVCGDRGFYF corresponding to amino acids 1-57 of Q14620 (SEQ ID NO:221), which also corresponds to amino acids 1-57 of HSIGFACI_PEA_{—}1_P8 (SEQ ID NO:230), and a second amino acid sequence being at least 70%, optionally at least 80%, preferably at least 85%, more preferably at least 90% and most preferably at least 95% homologous to a polypeptide having the sequence SRKILLKLRSSVARCSGSLLKFQQFERPRQENCLS (SEQ ID NO:488) corresponding to amino acids 58-92 of HSIGFACI_PEA_{—}1_P8 (SEQ ID NO:230), wherein said first amino acid sequence and second amino acid sequence are contiguous and in a sequential order.

[0869] 2. An isolated polypeptide encoding for a tail of HSIGFACI_PEA_{—}1_P8 (SEQ ID NO:230), comprising a polypeptide being at least 70%, optionally at least about 80%, preferably at least about 85%, more preferably at least about 90% and most preferably at least about 95% homologous to the sequence SRKILLKLRSSVARCSGSLLKFQQFERPRQENCLS (SEQ ID NO:488) in HSIGFACI_PEA_{—}1_P8 (SEQ ID NO:230).

[0870] Comparison report between HSIGFACI_PEA_{—}1_P8 (SEQ ID NO:230) and IGFB_HUMAN (SEQ ID NO:220):

[0871] 1. An isolated chimeric polypeptide encoding for HSIGFACI_PEA_{—}1_P8 (SEQ ID NO:230), comprising a first amino acid sequence being at least 70%, optionally at least 80%, preferably at least 85%, more preferably at least 90% and most preferably at least 95% homologous to a polypeptide having the sequence MITPT (SEQ ID NO:485) corresponding to amino acids 1-5 of HSIGFACI_PEA_{—}1_P8 (SEQ ID NO:230), a second amino acid sequence being at least 90% homologous to VKMHTMSSSHLFYLALCLLTFTSSATAGPETLCGAELVDALQFVCGDRGFYF corresponding to amino acids 22-73 of IGFB_HUMAN (SEQ ID NO:220), which also corresponds to amino acids 6-57 of HSIGFACI_PEA_{—}1_P8 (SEQ ID NO:230), and a third amino acid sequence being at least 70%, optionally at least 80%, preferably at least 85%, more preferably at least 90% and most preferably at least 95% homologous to a polypeptide having the sequence SRKILLKLRSSVARCSGSLLKFQQFERPRQENCLS (SEQ ID NO:488) corresponding to amino acids 58-92 of HSIGFACI_PEA_{—}1_P8 (SEQ ID NO:230), wherein said first amino acid sequence, second amino acid sequence and third amino acid sequence are contiguous and in a sequential order.

[0872] 2. An isolated polypeptide encoding for a head of HSIGFACI_PEA_{—}1_P8 (SEQ ID NO:230), comprising a polypeptide being at least 70%, optionally at least about 80%, preferably at least about 85%, more preferably at least about 90% and most preferably at least about 95% homologous to the sequence MITPT (SEQ ID NO:485) of HSIGFACI_PEA_{—}1_P8 (SEQ ID NO:230).

[0873] 3. An isolated polypeptide encoding for a tail of HSIGFACI_PEA_{—}1_P8 (SEQ ID NO:230), comprising a polypeptide being at least 70%, optionally at least about 80%, preferably at least about 85%, more preferably at least about 90% and most preferably at least about 95% homologous to the sequence SRKILLKLRSSVARCSGSLLKFQQFERPRQENCLS (SEQ ID NO:488) in HSIGFACI_PEA_{—}1_P8 (SEQ ID NO:230).

[0874] Comparison report between HSIGFACI_PEA_{—}1_P8 (SEQ ID NO:230) and IGFA_HUMAN (SEQ ID NO:223):

[0875] 1. An isolated chimeric polypeptide encoding for HSIGFACI_PEA_{—}1_P8 (SEQ ID NO:230), comprising a first amino acid sequence being at least 70%, optionally at least 80%, preferably at least 85%, more preferably at least 90% and most preferably at least 95% homologous to a polypeptide having the sequence MITPT (SEQ ID NO:485) corresponding to amino acids 1-5 of HSIGFACI_PEA_{—}1_P8 (SEQ ID NO:230), a second amino acid sequence being at least 90% homologous to VKMHTMSSSHLFYLALCLLTFTSSATAGPETLCGAELVDALQFVCGDRGFYF corresponding to amino acids 22-73 of IGFA_HUMAN (SEQ ID NO:223), which also corresponds to amino acids 6-57 of HSIGFACI_PEA_{—}1_P8 (SEQ ID NO:230), and a third amino acid sequence being at least 70%, optionally at least 80%, preferably at least 85%, more preferably at least 90% and most preferably at least 95% homologous to a polypeptide having the sequence SRKILLKLRSSVARCSGSLLKFQQFERPRQENCLS (SEQ ID NO:488) corresponding to amino acids 58-92 of HSIGFACI_PEA_{—}1_P8 (SEQ ID NO:230), wherein said first amino acid sequence, second amino acid sequence and third amino acid sequence are contiguous and in a sequential order.

[0876] 2. An isolated polypeptide encoding for a head of HSIGFACI_PEA_{—}1_P8 (SEQ ID NO:230), comprising a polypeptide being at least 70%, optionally at least about 80%, preferably at least about 85%, more preferably at least about 90% and most preferably at least about 95% homologous to the sequence MITPT (SEQ ID NO:485) of HSIGFACI_PEA_{—}1_P8 (SEQ ID NO:230).

[0877] 3. An isolated polypeptide encoding for a tail of HSIGFACI_PEA_{—}1_P8 (SEQ ID NO:230), comprising a polypeptide being at least 70%, optionally at least about 80%, preferably at least about 85%, more preferably at least about 90% and most preferably at least about 95% homologous to the sequence SRKILLKLRSSVARCSGSLLKFQQFERPRQENCLS (SEQ ID NO:488) in HSIGFACI_PEA_{—}1_P8 (SEQ ID NO:230).

[0878] The location of the variant protein was determined according to results from a number of different software programs and analyses, including analyses from SignalP and other specialized programs. The variant protein is believed to be located as follows with regard to the cell: secreted. The protein localization is believed to be secreted because both signal-peptide prediction programs predict that this protein has a signal peptide, and neither trans-membrane region prediction program predicts that this protein has a trans-membrane region.

[0879] Variant protein HSIGFACI_PEA_{—}1_P8 (SEQ ID NO:230) also has the following non-silent SNPs (Single Nucleotide Polymorphisms) as listed in Table 15, (given according to their position(s) on the amino acid sequence, with the alternative amino acid(s) listed; the last column indicates whether the SNP is known or not; the presence of known SNPs in variant protein HSIGFACI_PEA_{—}1_P8 (SEQ ID NO:230) Sequence provides support for the deduced sequence of this variant protein according to the present invention).

TABLE 15
Amino acid mutations

| SNP position(s) on amino acid | | Previously |
|---|---|---|
| sequence | Alternative amino acid(s) | known SNP? |
| 28 | S -> N | No |

[0880] Variant protein HSIGFACI_PEA_{—}1_P8 (SEQ ID NO:230) is encoded by the following transcript(s): HSIGFACI_PEA_{—}1_T17 (SEQ ID NO:203), for which the sequence(s) is/are given at the end of the application. The coding portion of transcript HSIGFACI_PEA_{—}1_T17 (SEQ ID NO:203) is shown in bold; this coding portion starts at position 835 and ends at position 1110. The transcript also has the following SNPs as listed in Table 16 (given according to their position on the nucleotide sequence, with the alternative nucleic acid listed; the last column indicates whether the SNP is known or not; the presence of known SNPs in variant protein HSIGFACI_PEA_{—}1_P8 (SEQ ID NO:230) Sequence provides support for the deduced sequence of this variant protein according to the present invention).

TABLE 16
Nucleic acid SNPs

| SNP position on nucleotide | | Previously |
|---|---|---|
| sequence | Alternative nucleic acid | known SNP? |
| 917 | G -> A | No |
| 942 | G -> A | Yes |
| 1208 | G -> A | Yes |
| 1331 | A -> G | Yes |
| 1371 | A -> C | Yes |
| 1374 | G -> A | Yes |
| 1380 | A -> C | Yes |
| 1430 | C -> T | Yes |
| 1617 | C -> T | Yes |
| 1892 | C -> A | Yes |
| 2277 | T -> C | Yes |
| 2418 | C -> T | No |

[0881] As noted above, cluster HSIGFACI features 16 segment(s), which were listed in Table 2 above and for which the sequence(s) are given at the end of the application. These segment(s) are portions of nucleic acid sequence(s) which are described herein separately because they are of particular interest. A description of each segment according to the present invention is now provided.

[0882] Segment cluster HSIGFACI_PEA_{—}1_node_{—}0 (SEQ ID NO:204) according to the present invention is supported by 53 libraries. The number of libraries was determined as previously described. This segment can be found in the following transcript(s): HSIGFACI_PEA_{—}1_T10 (SEQ ID NO:199), HSIGFACI_PEA_{—}1_T15 (SEQ ID NO:201) and HSIGFACI_PEA_{—}1_T16 (SEQ ID NO:202). Table 17 below describes the starting and ending position of this segment on each transcript.

TABLE 17
Segment location on transcripts

| | Segment | |
|---|---|---|
| | starting | Segment |
| Transcript name | position | ending position |
| HSIGFACI_PEA_1_T10 (SEQ ID | 1 | 328 |
| NO: 199) | | |
| HSIGFACI_PEA_1_T15 (SEQ ID | 1 | 328 |
| NO: 201) | | |
| HSIGFACI_PEA_1_T16 (SEQ ID | 1 | 328 |
| NO: 202) | | |

[0883] Segment cluster HSIGFACI_PEA_{—}1_node_{—}2 (SEQ ID NO:205) according to the present invention is supported by 14 libraries. The number of libraries was determined as previously described. This segment can be found in the following transcript(s): HSIGFACI_PEA_{—}1_T9 (SEQ ID NO:198), HSIGFACI_PEA_{—}1_T12 (SEQ ID NO:200) and HSIGFACI_PEA_{—}1_T17 (SEQ ID NO:203). Table 18 below describes the starting and ending position of this segment on each transcript.

TABLE 18
Segment location on transcripts

| | Segment | |
|---|---|---|
| | starting | Segment |
| Transcript name | position | ending position |
| HSIGFACI_PEA_1_T9 (SEQ ID | 1 | 849 |
| NO: 198) | | |
| HSIGFACI_PEA_1_T12 (SEQ ID | 1 | 849 |
| NO: 200) | | |
| HSIGFACI_PEA_1_T17 (SEQ ID | 1 | 849 |
| NO: 203) | | |

[0884] Segment cluster HSIGFACI_PEA_{—}1_node_{—}6 (SEQ ID NO:206) according to the present invention is supported by 62 libraries. The number of libraries was determined as previously described. This segment can be found in the following transcript(s): HSIGFACI_PEA_{—}1_T9 (SEQ ID NO:198), HSIGFACI_PEA_{—}1_T10 (SEQ ID NO:199), HSIGFACI_PEA_{—}1_T12 (SEQ ID NO:200), HSIGFACI_PEA_{—}1_T15 (SEQ ID NO:201), HSIGFACI_PEA_{—}1_T16 (SEQ ID NO:202) and HSIGFACI_PEA_{—}1_T17 (SEQ ID NO:203). Table 19 below describes the starting and ending position of this segment on each transcript.

TABLE 19
Segment location on transcripts

| | Segment | |
|---|---|---|
| | starting | Segment |
| Transcript name | position | ending position |
| HSIGFACI_PEA_1_T9 (SEQ ID | 850 | 1006 |
| NO: 198) | | |
| HSIGFACI_PEA_1_T10 (SEQ ID | 329 | 485 |
| NO: 199) | | |
| HSIGFACI_PEA_1_T12 (SEQ ID | 850 | 1006 |
| NO: 200) | | |
| HSIGFACI_PEA_1_T15 (SEQ ID | 329 | 485 |
| NO: 201) | | |
| HSIGFACI_PEA_1_T16 (SEQ ID | 329 | 485 |
| NO: 202) | | |
| HSIGFACI_PEA_1_T17 (SEQ ID | 850 | 1006 |
| NO: 203) | | |

[0885] Segment cluster HSIGFACI_PEA_{—}1_node_{—}9 (SEQ ID NO:207) according to the present invention is supported by 4 libraries. The number of libraries was determined as previously described. This segment can be found in the following transcript(s): HSIGFACI_PEA_{—}1_T10 (SEQ ID NO:199) and HSIGFACI_PEA_{—}1_T17 (SEQ ID NO:203). Table 20 below describes the starting and ending position of this segment on each transcript.

TABLE 20
Segment location on transcripts

| | Segment | |
|---|---|---|
| | starting | Segment |
| Transcript name | position | ending position |
| HSIGFACI_PEA_1_T10 (SEQ ID | 486 | 1031 |
| NO: 199) | | |
| HSIGFACI_PEA_1_T17 (SEQ ID | 1007 | 1552 |
| NO: 203) | | |

[0886] Segment cluster HSIGFACI_PEA_{—}1_node_{—}11 (SEQ ID NO:208) according to the present invention is supported by 53 libraries. The number of libraries was determined as previously described. This segment can be found in the following transcript(s): HSIGFACI_PEA_{—}1_T9 (SEQ ID NO:198), HSIGFACI_PEA_{—}1_T10 (SEQ ID NO:199), HSIGFACI_PEA_{—}1_T12 (SEQ ID NO:200), HSIGFACI_PEA_{—}1_T15 (SEQ ID NO:201), HSIGFACI_PEA_{—}1_T16 (SEQ ID NO:202) and HSIGFACI_PEA_{—}1_T17 (SEQ ID NO:203). Table 21 below describes the starting and ending position of this segment on each transcript.

TABLE 21
Segment location on transcripts

| | Segment | Segment |
|---|---|---|
| | starting | ending |
| Transcript name | position | position |
| HSIGFACI_PEA_1_T9 (SEQ ID | 1007 | 1188 |
| NO: 198) | | |
| HSIGFACI_PEA_1_T10 (SEQ ID | 1032 | 1213 |
| NO: 199) | | |
| HSIGFACI_PEA_1_T12 (SEQ ID | 1007 | 1188 |
| NO: 200) | | |
| HSIGFACI_PEA_1_T15 (SEQ ID | 486 | 667 |
| NO: 201) | | |
| HSIGFACI_PEA_1_T16 (SEQ ID | 486 | 667 |
| NO: 202) | | |
| HSIGFACI_PEA_1_T17 (SEQ ID | 1553 | 1734 |
| NO: 203) | | |

[0887] Segment cluster HSIGFACI_PEA_{—}1_node_{—}14 (SEQ ID NO:209) according to the present invention is supported by 22 libraries. The number of libraries was determined as previously described. This segment can be found in the following transcript(s): HSIGFACI_PEA_{—}1_T15 (SEQ ID NO:201) and HSIGFACI_PEA_{—}1_T17 (SEQ ID NO:203). Table 22 below describes the starting and ending position of this segment on each transcript.

TABLE 22
Segment location on transcripts

| | Segment | Segment |
|---|---|---|
| | starting | ending |
| Transcript name | position | position |
| HSIGFACI_PEA_1_T15 (SEQ ID | 717 | 1681 |
| NO: 201) | | |
| HSIGFACI_PEA_1_T17 (SEQ ID | 1784 | 2748 |
| NO: 203) | | |

[0888] Segment cluster HSIGFACI_PEA_{—}1_node_{—}19 (SEQ ID NO:210) according to the present invention is supported by 99 libraries. The number of libraries was determined as previously described. This segment can be found in the following transcript(s): HSIGFACI_PEA_{—}1_T9 (SEQ ID NO:198), HSIGFACI_PEA_{—}1_TIO (SEQ ID NO:199), HSIGFACI_PEA_{—}1_T12 (SEQ ID NO:200) and HSIGFACI_PEA_{—}1_T16 (SEQ ID NO:202). Table 23 below describes the starting and ending position of this segment on each transcript.

TABLE 23
Segment location on transcripts

| | Segment | Segment |
|---|---|---|
| | starting | ending |
| Transcript name | position | position |
| HSIGFACI_PEA_1_T9 (SEQ ID | 1238 | 5030 |
| NO: 198) | | |
| HSIGFACI_PEA_1_T10 (SEQ ID | 1214 | 5006 |
| NO: 199) | | |
| HSIGFACI_PEA_1_T12 (SEQ ID | 1189 | 1406 |
| NO: 200) | | |
| HSIGFACI_PEA_1_T16 (SEQ ID | 668 | 885 |
| NO: 202) | | |

[0889] Segment cluster HSIGFACI_PEA_{—}1_node_{—}20 (SEQ ID NO:211) according to the present invention is supported by 10 libraries. The number of libraries was determined as previously described. This segment can be found in the following transcript(s): HSIGFACI_PEA_{—}1_T9 (SEQ ID NO:198) and HSIGFACI_PEA_{—}1_T10 (SEQ ID NO:199). Table 24 below describes the starting and ending position of this segment on each transcript.

TABLE 24
Segment location on transcripts

| | Segment | Segment |
|---|---|---|
| | starting | ending |
| Transcript name | position | position |
| HSIGFACI_PEA_1_T9 (SEQ ID | 5031 | 5198 |
| NO: 198) | | |
| HSIGFACI_PEA_1_T10 (SEQ ID | 5007 | 5174 |
| NO: 199) | | |

[0890] Segment cluster HSIGFACI_PEA_{—}1_node_{—}21 (SEQ ID NO:212) according to the present invention is supported by 57 libraries. The number of libraries was determined as previously described. This segment can be found in the following transcript(s): HSIGFACI_PEA_{—}1_T9 (SEQ ID NO:198) and HSIGFACI_PEA_{—}1_T10 (SEQ ID NO:199). Table 25 below describes the starting and ending position of this segment on each transcript.

TABLE 25
Segment location on transcripts

| | Segment | Segment |
|---|---|---|
| | starting | ending |
| Transcript name | position | position |
| HSIGFACI_PEA_1_T9 (SEQ ID | 5199 | 7012 |
| NO: 198) | | |
| HSIGFACI_PEA_1_T10 (SEQ ID | 5175 | 6988 |
| NO: 199) | | |

[0891] Segment cluster HSIGFACI_PEA_{—}1_node_{—}24 (SEQ ID NO:213) according to the present invention is supported by 57 libraries. The number of libraries was determined as previously described. This segment can be found in the following transcript(s): HSIGFACI_PEA_{—}1_T9 (SEQ ID NO:198) and HSIGFACI_PEA_{—}1_T10 (SEQ ID NO:199). Table 26 below describes the starting and ending position of this segment on each transcript.

TABLE 26
Segment location on transcripts

| | Segment | Segment |
|---|---|---|
| | starting | ending |
| Transcript name | position | position |
| HSIGFACI_PEA_1_T9 (SEQ ID | 7071 | 7396 |
| NO: 198) | | |
| HSIGFACI_PEA_1_T10 (SEQ ID | 7047 | 7372 |
| NO: 199) | | |

[0892] Segment cluster HSIGFACI_PEA_{—}1_node_{—}25 (SEQ ID NO:214) according to the present invention is supported by 54 libraries. The number of libraries was determined as previously described. This segment can be found in the following transcript(s): HSIGFACI_PEA_{—}1_T9 (SEQ ID NO:198) and HSIGFACI_PEA_{—}1_T10 (SEQ ID NO:199). Table 27 below describes the starting and ending position of this segment on each transcript.

TABLE 27
Segment location on transcripts

| | Segment | Segment |
|---|---|---|
| | starting | ending |
| Transcript name | position | position |
| HSIGFACI_PEA_1_T9 (SEQ ID | 7397 | 7557 |
| NO: 198) | | |
| HSIGFACI_PEA_1_T10 (SEQ ID | 7373 | 7533 |
| NO: 199) | | |

[0893] Segment cluster HSIGFACI_PEA_{—}1_node_{—}26 (SEQ ID NO:215) according to the present invention is supported by 51 libraries. The number of libraries was determined as previously described. This segment can be found in the following transcript(s): HSIGFACI_PEA_{—}1_T9 (SEQ ID NO:198) and HSIGFACI_PEA_{—}1_T10 (SEQ ID NO:199). Table 28 below describes the starting and ending position of this segment on each transcript.

TABLE 28
Segment location on transcripts

| | Segment | Segment |
|---|---|---|
| | starting | ending |
| Transcript name | position | position |
| HSIGFACI_PEA_1_T9 (SEQ ID | 7558 | 7783 |
| NO: 198) | | |
| HSIGFACI_PEA_1_T10 (SEQ ID | 7534 | 7759 |
| NO: 199) | | |

[0894] Segment cluster HSIGFACI_PEA_{—}1_node_{—}27 (SEQ ID NO:216) according to the present invention is supported by 37 libraries. The number of libraries was determined as previously described. This segment can be found in the following transcript(s): HSIGFACI_PEA_{—}1_T9 (SEQ ID NO:198) and HSIGFACI_PEA_{—}1_T10 (SEQ ID NO:199). Table 29 below describes the starting and ending position of this segment on each transcript.

TABLE 29
Segment location on transcripts

| | Segment | Segment |
|---|---|---|
| | starting | ending |
| Transcript name | position | position |
| HSIGFACI_PEA_1_T9 (SEQ ID | 7784 | 7935 |
| NO: 198) | | |
| HSIGFACI_PEA_1_T10 (SEQ ID | 7760 | 7911 |
| NO: 199) | | |

[0895] According to an optional embodiment of the present invention, short segments related to the above cluster are also provided. These segments are up to about 120 bp in length, and so are included in a separate description.

[0896] Segment cluster HSIGFACI_PEA_{—}1_node_{—}13 (SEQ ID NO:217) according to the present invention is supported by 17 libraries. The number of libraries was determined as previously described. This segment can be found in the following transcript(s): HSIGFACI_PEA_{—}1_T9 (SEQ ID NO:198), HSIGFACI_PEA_{—}1_T15 (SEQ ID NO:201) and HSIGFACI_PEA_{—}1_T17 (SEQ ID NO:203). Table 30 below describes the starting and ending position of this segment on each transcript.

TABLE 30
Segment location on transcripts

| | Segment | Segment |
|---|---|---|
| | starting | ending |
| Transcript name | position | position |
| HSIGFACI_PEA_1_T9 (SEQ ID | 1189 | 1237 |
| NO: 198) | | |
| HSIGFACI_PEA_1_T15 (SEQ ID | 668 | 716 |
| NO: 201) | | |
| HSIGFACI_PEA_1_T17 (SEQ ID | 1735 | 1783 |
| NO: 203) | | |

[0897] Segment cluster HSIGFACI_PEA_{—}1_node_{—}22 (SEQ ID NO:218) according to the present invention is supported by 23 libraries. The number of libraries was determined as previously described. This segment can be found in the following transcript(s): HSIGFACI_PEA_{—}1_T9 (SEQ ID NO:198) and HSIGFACI_PEA_{—}1_T10 (SEQ ID NO:199). Table 31 below describes the starting and ending position of this segment on each transcript.

TABLE 31
Segment location on transcripts

| | Segment | Segment |
|---|---|---|
| Transcript name | starting position | ending position |
| HSIGFACI_PEA_1_T9 (SEQ ID | 7013 | 7045 |
| NO: 198) | | |
| HSIGFACI_PEA_1_T10 (SEQ ID | 6989 | 7021 |
| NO: 199) | | |

[0898] Segment cluster HSIGFACI_PEA_{—}1_node_{—}23 (SEQ ID NO:219) according to the present invention can be found in the following transcript(s): HSIGFACI_PEA_{—}1_T9 (SEQ ID NO:198) and HSIGFACI_PEA_{—}1_T10 (SEQ ID NO:199). Table 32 below describes the starting and ending position of this segment on each transcript.

TABLE 32
Segment location on transcripts

| | Segment | Segment |
|---|---|---|
| Transcript name | starting position | ending position |
| HSIGFACI_PEA_1_T9 (SEQ ID | 7046 | 7070 |
| NO: 198) | | |
| HSIGFACI_PEA_1_T10 (SEQ ID | 7022 | 7046 |
| NO: 199) | | |

[0899] Variant protein alignment to the previously known protein:

| Sequence name: Q9NP10 (SEQ ID NO:222) | | | |
|---|---|---|---|
| Sequence documentation: | | | |
| Alignment of: HSIGFACI_PEA_1_P5 (SEQ ID NO:225) × | | | |
| Q9NP10 (SEQ ID NO:222) . . | | | |
| Alignment segment 1/1: | | | |
| Quality: | 1107.00 | Escore: | 0 |
| Matching length: | 111 | Total length: | 111 |
| Matching Percent | 100.00 | Matching Percent | 100.00 |
| Similarity: | | Identity: | |
| Total Percent | 100.00 | Total Percent | 100.00 |
| Similarity: | | Identity: | |
| Gaps: | 0 | | |

| Alignment: | | |
|---|---|---|
| | . . . . . | |
| 8 | MHTMSSSHLFYLALCLLTFTSSATAGPETLCGAELVDALQFVCGDRGFYF | 57 |
| | \|\|\|\|\|\|\|\|\|\|\|\|\|\|\|\|\|\|\|\|\|\|\|\|\|\|\|\|\|\|\|\|\|\|\|\|\|\|\|\|\|\|\|\|\|\|\|\|\|\| | |
| 1 | MHTMSSSHLFYLALCLLTFTSSATAGPETLCGAELVDALQFVCGDRGFYF | 50 |
| | . . . . . | |
| 58 | NKPTGYGSSSRRAPQTGIVDECCFRSCDLRRLEMYCAPLKPAKSARSVRA | 107 |
| | \|\|\|\|\|\|\|\|\|\|\|\|\|\|\|\|\|\|\|\|\|\|\|\|\|\|\|\|\|\|\|\|\|\|\|\|\|\|\|\|\|\|\|\|\|\|\|\|\|\| | |
| 51 | NKPTGYGSSSRRAPQTGIVDECCFRSCDLRRLEMYCAPLKPAKSARSVRA | 100 |
| | . | |
| 108 | QRHTDMPKTQK | 118 |
| | \|\|\|\|\|\|\|\|\|\|\| | |
| 101 | QRHTDMPKTQK | 111 |

| Sequence name: Q13429 (SEQ ID NO:224) | | | |
|---|---|---|---|
| Sequence documentation: | | | |
| Alignment of: HSIGFACI_PEA_1_P5 (SEQ ID NO:225) × | | | |
| Q13429 (SEQ ID NO:224) . . | | | |
| Alignment segment 1/1: | | | |
| Quality: | 1369.00 | Escore: | 0 |
| Matching length: | 137 | Total length: | 137 |
| Matching Percent | 100.00 | Matching Percent | 100.00 |
| Similarity: | | Identity: | |
| Total Percent | 100.00 | Total Percent | 100.00 |
| Similarity: | | Identity: | |
| Gaps: | 0 | | |

| Alignment: | | |
|---|---|---|
| | . . . . . | |
| 6 | VKMHTMSSSHLFYLALCLLTFTSSATAGPETLCGAELVDALQFVCGDRGF | 55 |
| | \|\|\|\|\|\|\|\|\|\|\|\|\|\|\|\|\|\|\|\|\|\|\|\|\|\|\|\|\|\|\|\|\|\|\|\|\|\|\|\|\|\|\|\|\|\|\|\|\|\| | |
| 3 | VKMHTMSSSHLFYLALCLLTFTSSATAGPETLCGAELVDALQFVCGDRGF | 52 |
| | . . . . . | |
| 56 | YFNKPTGYGSSSRRAPQTGIVDECCFRSCDLRRLEMYCAPLKPAKSARSV | 105 |
| | \|\|\|\|\|\|\|\|\|\|\|\|\|\|\|\|\|\|\|\|\|\|\|\|\|\|\|\|\|\|\|\|\|\|\|\|\|\|\|\|\|\|\|\|\|\|\|\|\|\| | |
| 53 | YFNKPTGYGSSSRRAPQTGIVDECCFRSCDLRRLEMYCAPLKPAKSARSV | 102 |
| | . . . | |
| 106 | RAQRHTDMPKTQKYQPPSTNKNTKSQRRKGSTFEERK | 142 |
| | \|\|\|\|\|\|\|\|\|\|\|\|\|\|\|\|\|\|\|\|\|\|\|\|\|\|\|\|\|\|\|\|\|\|\|\|\| | |
| 103 | RAQRHTDMPKTQKYQPPSTNKNTKSQRRKGSTFEERK | 139 |

| Sequence name: IGFB_HUMAN (SEQ ID NO:220) | | | |
|---|---|---|---|
| Sequence documentation: | | | |
| Alignment of: HSIGFACI_PEA_1_P5 (SEQ ID NO:225) × | | | |
| IGFB_HUMAN (SEQ ID NO:220) . . | | | |
| Alignment segment 1/1: | | | |
| Quality: | 1300.00 | Escore: | 0 |
| Matching length: | 130 | Total length: | 130 |
| Matching Percent | 100.00 | Matching Percent | 100.00 |
| Similarity: | | Identity: | |
| Total Percent | 100.00 | Total Percent | 100.00 |
| Similarity: | | Identity: | |
| Gaps: | 0 | | |

| Alignment: | | |
|---|---|---|
| | . . . . . | |
| 6 | VKMHTMSSSHLFYLALCLLTFTSSATAGPETLCGAELVDALQFVCGDRGF | 55 |
| | \|\|\|\|\|\|\|\|\|\|\|\|\|\|\|\|\|\|\|\|\|\|\|\|\|\|\|\|\|\|\|\|\|\|\|\|\|\|\|\|\|\|\|\|\|\|\|\|\|\| | |
| 22 | VKMHTMSSSHLFYLALCLLTFTSSATAGPETLCGAELVDALQFVCGDRGF | 71 |
| | . . . . . | |
| 56 | YFNKPTGYGSSSRRAPQTGIVDECCFRSCDLRRLEMYCAPLKPAKSARSV | 105 |
| | \|\|\|\|\|\|\|\|\|\|\|\|\|\|\|\|\|\|\|\|\|\|\|\|\|\|\|\|\|\|\|\|\|\|\|\|\|\|\|\|\|\|\|\|\|\|\|\|\|\| | |
| 72 | YFNFPTGYGSSSRRAPQTGIVDECCFRSCDLRRLEMYCAPLKPAKSARSV | 121 |
| | . . . | |
| 106 | RAQRHTDMPKTQKYQPPSTNKNTKSQRRKG | 135 |
| | \|\|\|\|\|\|\|\|\|\|\|\|\|\|\|\|\|\|\|\|\|\|\|\|\|\|\|\|\| | |
| 122 | RAQRHTDMPKTQKYQPPSTNKNTKSQRRKG | 151 |

Sequence name: Q14620 (SEQ ID NO:221)
Sequence documentation:
Alignment of: HSIGFACI_PEA_1_P5 (SEQ ID NO:225) ×
Q14620 (SEQ ID NO:221) . .
Alignment segment 1/1:

| | | | |
|---|---|---|---|
| Quality: | 1175.00 | Escore: | 0 |
| Matching length: | 118 | Total length: | 118 |
| Matching Percent | 100.00 | Matching Percent | 100.00 |
| Similarity: | | Identity: | |
| Total Percent | 100.00 | Total Percent | 100.00 |
| Similarity: | | Identity: | |
| Gaps: | 0 | | |

| Alignment: | | |
|---|---|---|
| | . . . . . | |
| 1 | MITPTVKMHTMSSSHLFYLALCLLTFTSSATAGPETLCGAELVDALQFVC | 50 |
| | \|\|\|\|\|\|\|\|\|\|\|\|\|\|\|\|\|\|\|\|\|\|\|\|\|\|\|\|\|\|\|\|\|\|\|\|\|\|\|\|\|\|\|\|\|\|\|\|\|\| | |
| 1 | MITPTVKMHTMSSSHLFYLALCLLTFTSSATAGPETLCGAELVDALQFVC | 50 |
| | . . . . . | |
| 51 | GDRGFYFNKPTGYGSSSRRAPQTGIVDECCFRSCDLRRLEMYCAPLKPAK | 100 |
| | \|\|\|\|\|\|\|\|\|\|\|\|\|\|\|\|\|\|\|\|\|\|\|\|\|\|\|\|\|\|\|\|\|\|\|\|\|\|\|\|\|\|\|\|\|\|\|\|\|\| | |
| 51 | GDRGFYFNKPTGYGSSSRRAPQTGIVDECCFRSCDLRRLEMYCAPLKPAK | 100 |
| | . | |
| 101 | SARSVRAQRHTDMPKTQK | 118 |
| | \|\|\|\|\|\|\|\|\|\|\|\|\|\|\|\|\|\| | |
| 101 | SARSVRAQRHTDMPKTQK | 118 |

| Sequence name: IGFA_HUMAN (SEQ ID NO:223) | | | |
|---|---|---|---|
| Sequence documentation: | | | |
| Alignment of: HSIGFACI_PEA_1_P5 (SEQ ID NO:225) × | | | |
| IGFA_HUMAN (SEQ ID NO:223) . . | | | |
| Alignment segment 1/1: | | | |
| Quality: | 1125.00 | Escore: | 0 |
| Matching length: | 113 | Total length: | 113 |
| Matching Percent | 100.00 | Matching Percent | 100.00 |
| Similarity: | | Identity: | |
| Total Percent | 100.00 | Total Percent | 100.00 |
| Similarity: | | Identity: | |
| Gaps: | 0 | | |

| Alignment: | | |
|---|---|---|
| | . . . . . | |
| 6 | VKMHTMSSSHLFYLALCLLTFTSSATAGPETLCGAELVDALQFVCGDRGF | 55 |
| | \|\|\|\|\|\|\|\|\|\|\|\|\|\|\|\|\|\|\|\|\|\|\|\|\|\|\|\|\|\|\|\|\|\|\|\|\|\|\|\|\|\|\|\|\|\|\|\|\|\| | |
| 22 | VKMHTMSSSHLFYLALCLLTFTSSATAGPETLCGAELVDALQFVCGDRGF | 71 |
| | . . . . . | |
| 56 | YFNKPTGYGSSSRRAPQTGIVDECCFRSCDLRRLEMYCAPLKPAKSARSV | 105 |
| | \|\|\|\|\|\|\|\|\|\|\|\|\|\|\|\|\|\|\|\|\|\|\|\|\|\|\|\|\|\|\|\|\|\|\|\|\|\|\|\|\|\|\|\|\|\|\|\|\|\| | |
| 72 | YFNKPTGYGSSSRRAPQTGIVDECCFRSCDLRRLEMYCAPLKPAKSARSV | 121 |
| | . | |
| 106 | RAQRHTDMPKTQK | 118 |
| | \|\|\|\|\|\|\|\|\|\|\|\|\| | |
| 122 | RAQRHTDMPKTQK | 134 |

| Sequence name: IGFA_HUMAN (SEQ ID NO:223) | | | |
|---|---|---|---|
| Sequence documentation: | | | |
| Alignment of: HSIGFACI_PEA_1_P2 (SEQ ID NO:226) × | | | |
| IGFA_HUMAN (SEQ ID NO:223) . . | | | |
| Alignment segment 1/1: | | | |
| Quality: | 1313.00 | Escore: | 0 |
| Matching length: | 132 | Total length: | 132 |
| Matching Percent | 100.00 | Matching Percent | 100.00 |
| Similarity: | | Identity: | |
| Total Percent | 100.00 | Total Percent | 100.00 |
| Similarity: | | Identity: | |
| Gaps: | 0 | | |

| Alignment: | | |
|---|---|---|
| | . . . . . | |
| 6 | VKMHTMSSSHLFYLALCLLTFTSSATAGPETLCGAELVDALQFVCGDRGF 55 | |
| | \|\|\|\|\|\|\|\|\|\|\|\|\|\|\|\|\|\|\|\|\|\|\|\|\|\|\|\|\|\|\|\|\|\|\|\|\|\|\|\|\|\|\|\|\|\|\|\|\|\| | |
| 22 | VKMHTMSSSHLFYLALCLLTFTSSATAGPETLCGAELVDALQFVCGDRGF | 71 |
| | . . . . . | |
| 56 | YFNKPTGYGSSSRRAPQTGIVDECCFRSCDLRRLEMYCAPLKPAKSARSV | 105 |
| | \|\|\|\|\|\|\|\|\|\|\|\|\|\|\|\|\|\|\|\|\|\|\|\|\|\|\|\|\|\|\|\|\|\|\|\|\|\|\|\|\|\|\|\|\|\|\|\|\|\| | |
| 72 | YFNKPTGYGSSSRRAPQTGIVDECCFRSCDLRRLEMYCAPLKPAKSARSV | 121 |
| | . . . | |
| 106 | RAQRHTDMPKTQKEVHLKNASRGSAGNKNYRM | 137 |
| | \|\|\|\|\|\|\|\|\|\|\|\|\|\|\|\|\|\|\|\|\|\|\|\|\|\|\|\|\|\|\|\| | |
| 122 | RAQRHTDMPKTQKEVHLKNASRGSAGNKNYRM | 153 |

| Sequence name: IGFA_HUMAN (SEQ ID NO:223) | | | |
|---|---|---|---|
| Sequence documentation: | | | |
| Alignment of: HSIGFACI_PEA_1_26 (SEQ ID NO: 227) × | | | |
| IGFA_HUMAN (SEQ ID NO:223) . . | | | |
| Alignment segment 1/1: | | | |
| Quality: | 1343.00 | Escore: | 0 |
| Matching length: | 134 | Total length: | 134 |
| Matching Percent | 100.00 | Matching Percent | 100.00 |
| Similarity: | | Identity: | |
| Total Percent | 100.00 | Total Percent | 100.00 |
| Similarity: | | Identity: | |
| Gaps: | 0 | | |

| Alignment: | | |
|---|---|---|
| | . . . . . | |
| 1 | MGKISSLPTQLFKCCFCDFLKVKMHTMSSSHLFYLALCLLTFTSSATAGP | 50 |
| | \|\|\|\|\|\|\|\|\|\|\|\|\|\|\|\|\|\|\|\|\|\|\|\|\|\|\|\|\|\|\|\|\|\|\|\|\|\|\|\|\|\|\|\|\|\|\|\|\|\| | |
| 1 | MGKISSLPTQLFKCCFCDFLKVKMHTMSSSHLFYLALCLLTFTSSATAGP | 50 |
| | . . . . . | |
| 51 | ETLCGAELVDALQFVCGDRGFYFNKPTGYGSSSRRAPQTGIVDECCFRSC | 100 |
| | \|\|\|\|\|\|\|\|\|\|\|\|\|\|\|\|\|\|\|\|\|\|\|\|\|\|\|\|\|\|\|\|\|\|\|\|\|\|\|\|\|\|\|\|\|\|\|\|\|\| | |
| 51 | ETLCGAELVDALQFVCGDRGFYFNKPTGYGSSSRRAPQTGIVDECCFRSC | 100 |
| | . . . | |
| 101 | DLRRLEMYCAPLKPAKSARSVRAQRHTDMPKTQK | 134 |
| | \|\|\|\|\|\|\|\|\|\|\|\|\|\|\|\|\|\|\|\|\|\|\|\|\|\|\|\|\|\|\|\|\|\| | |
| 101 | DLRRLEMYCAPLKPAKSARSVRAQRHTDMPKTQK | 134 |

| Sequence name: IGFB_HUMAN (SEQ ID NO:220) | | | |
|---|---|---|---|
| Sequence documentation: | | | |
| Alignment of: HSIGFACI_PEA_1_P1 (SEQ ID NO:228) × | | | |
| IGFB HUMAN (SEQ ID NO:220) . . | | | |
| Alignment segment 1/1: | | | |
| Quality: | 1343.00 | Escore: | 0 |
| Matching length: | 134 | Total length: | 134 |
| Matching Percent | 100.00 | Matching Percent | 100.00 |
| Similarity: | | Identity: | |
| Total Percent | 100.00 | Total Percent | 100.00 |
| Similarity: | | Identity: | |
| Gaps: | 0 | | |

| Alignment: | | |
|---|---|---|
| | . . . . . | |
| 1 | MGKISSLPTQLFKCCFCDFLKVKMHTMSSSHLFYLALCLLTFTSSATAGP | 50 |
| | \|\|\|\|\|\|\|\|\|\|\|\|\|\|\|\|\|\|\|\|\|\|\|\|\|\|\|\|\|\|\|\|\|\|\|\|\|\|\|\|\|\|\|\|\|\|\|\|\|\| | |
| 1 | MGKISSLPTQLFKCCFCDFLKVKMHTMSSSHLFYLALCLLTFTSSATAGP | 50 |
| | . . . . . | |
| 51 | ETLCGAELVDALQFVCGDRGFYFNKPTGYGSSSRRAPQTGIVDECCFRSC | 100 |
| | \|\|\|\|\|\|\|\|\|\|\|\|\|\|\|\|\|\|\|\|\|\|\|\|\|\|\|\|\|\|\|\|\|\|\|\|\|\|\|\|\|\|\|\|\|\|\|\|\|\| | |
| 51 | ETLCGAELVDALQFVCGDRGFYFNKPTGYGSSSRRAPQTGIVDECCFRSC | 100 |
| | . . . | |
| 101 | DLRRLEMYCAPLKPAKSARSVRAQRHTDMPKTQK | 134 |
| | \|\|\|\|\|\|\|\|\|\|\|\|\|\|\|\|\|\|\|\|\|\|\|\|\|\|\|\|\|\|\|\|\|\| | |
| 101 | DLRRLEMYCAPLKPAKSARSVRAQRHTDMPKTQK | 134 |

| Sequence name: IGFB_HUMAN (SEQ ID NO:220) | | | |
|---|---|---|---|
| Sequence documentation: | | | |
| Alignment of: HSIGFACI_PEA_1_P7 (SEQ ID NO:229) × | | | |
| IGFB HUMAN (SEQ ID NO:220) . . | | | |
| Alignment segment 1/1: | | | |
| Quality: | 729.00 | Escore: | 0 |
| Matching length: | 75 | Total length: | 75 |
| Matching Percent | 100.00 | Matching Percent | 97.33 |
| Similarity: | | Identity: | |
| Total Percent | 100.00 | Total Percent | 97.33 |
| Similarity: | | Identity: | |
| Gaps: | 0 | | |

| Alignment: | | |
|---|---|---|
| | . . . . . | |
| 1 | MGKISSLPTQLFKCCFCDFLKVKMHTMSSSHLFYLALCLLTFTSSATAGP | 50 |
| | \|\|\|\|\|\|\|\|\|\|\|\|\|\|\|\|\|\|\|\|\|\|\|\|\|\|\|\|\|\|\|\|\|\|\|\|\|\|\|\|\|\|\|\|\|\|\|\|\|\| | |
| 1 | MGKISSLPTQLFKCCFCDFLKVKMHTMSSSHLFYLALCLLTFTSSATAGP | 50 |
| | . . | |
| 51 | ETLCGAELVDALQFVCGDRGFYFSR | 75 |
| | \|\|\|\|\|\|\|\|\|\|\|\|\|\|\|\|\|\|\|\|\|\|\|:: | |
| 51 | ETLCGAELVDALQFVCGDRGFYFNK | 75 |

| Sequence name: IGFA_HUMAN (SEQ ID NO:223) | | | |
|---|---|---|---|
| Sequence documentation: | | | |
| Alignment of: HSIGFACI_PEA_1_P7 (SEQ ID NO:229) × | | | |
| IGFA HUMAN (SEQ ID NO:223) . . | | | |
| Alignment segment 1/1: | | | |
| Quality: | 729.00 | Escore: | 0 |
| Matching length: | 75 | Total length: | 75 |
| Matching Percent | 100.00 | Matching Percent | 97.33 |
| Similarity: | | Identity: | |
| Total Percent | 100.00 | Total Percent | 97.33 |
| Similarity: | | Identity: | |
| Gaps: | 0 | | |

| Alignment: | | |
|---|---|---|
| | . . . . . | |
| 1 | MGKISSLPTQLFKCCFCDFLKVKMHTMSSSHLFYLALCLLTFTSSATAGP | 50 |
| | \|\|\|\|\|\|\|\|\|\|\|\|\|\|\|\|\|\|\|\|\|\|\|\|\|\|\|\|\|\|\|\|\|\|\|\|\|\|\|\|\|\|\|\|\|\|\|\|\|\| | |
| 1 | MGKISSLPTQLFKCCFCDFLKVKMHTMSSSHLFYLALCLLTFTSSATAGP | 50 |
| | . . | |
| 51 | ETLCGAELVDALQFVCGDRGFYFSR | 75 |
| | \|\|\|\|\|\|\|\|\|\|\|\|\|\|\|\|\|\|\|\|\|\|\|\|\| | |
| 51 | ETLCGAELVDALQFVCGDRGFYFNK | 75 |

| Sequence name: Q9NP10 (SEQ ID NO:222) | | | |
|---|---|---|---|
| Sequence documentation: | | | |
| Alignment of: HSIGFACI_PEA_1_P8 (SEQ ID NO:230) × | | | |
| Q9NP10 (SEQ ID NO:222) | | | |
| Alignment segment 1/1: | | | |
| Quality: | 493.00 | Escore: | 0 |
| Matching length: | 52 | Total length: | 52 |
| Matching Percent | 100.00 | Matching Percent | 96.15 |
| Similarity: | | Identity: | |
| Total Percent | 100.00 | Total Percent | 96.15 |
| Similarity: | | Identity: | |
| Gaps: | 0 | | |

| Alignment: | | |
|---|---|---|
| | . . . . . | |
| 8 | MHTMSSSHLFYLALCLLTFTSSATAGPETLCGAELVDALQFVCGDRGFYF | 57 |
| | \|\|\|\|\|\|\|\|\|\|\|\|\|\|\|\|\|\|\|\|\|\|\|\|\|\|\|\|\|\|\|\|\|\|\|\|\|\|\|\|\|\|\|\|\|\|\|\|\|\| | |
| 1 | MHTMSSSHLFYLALCLLTFTSSATAGPETLCGAELVDALQFVCGDRGFYF | 50 |
| 58 | YFSR | 59 |
| | \|\|:: | |
| 51 | YFNK | 52 |

| Sequence name: Q13429 (SEQ ID NQ:224) | | | |
|---|---|---|---|
| Sequence documentation: | | | |
| Alignment of: HSIGFACI_PEA_1_P8 (SEQ ID NO:230) × | | | |
| Q13429 (SEQ ID NO:224) . . | | | |
| Alignment segment 1/1: | | | |
| Quality: | 511.00 | Escore: | 0 |
| Matching length: | 54 | Total length: | 54 |
| Matching Percent | 100.00 | Matching Percent | 96.30 |
| Similarity: | | Identity: | |
| Total Percent | 100.00 | Total Percent | 96.30 |
| Similarity: | | Identity: | |
| Gaps: | 0 | | |

| Alignment: | | |
|---|---|---|
| | . . . . . | |
| 6 | VKMHTMSSSHLFYLALCLLTFTSSATAGPETLCGAELVDALQFVCGDRGF | 55 |
| | \|\|\|\|\|\|\|\|\|\|\|\|\|\|\|\|\|\|\|\|\|\|\|\|\|\|\|\|\|\|\|\|\|\|\|\|\|\|\|\|\|\|\|\|\|\|\|\|\|\| | |
| 3 | VKMHTMSSSHLFYLALCLLTFTSSATAGPETLCGAELVDALQFVCGDRGF | 52 |
| 56 | YFSR | 59 |
| | \|\|:: | |
| 53 | YFNK | 56 |

| Sequence name: Q14620 (SEQ ID NO:221) | | | |
|---|---|---|---|
| Sequence documentation: | | | |
| Alignment of: HSIGFACI_PEA_1_P8 (SEQ ID NO:230) × | | | |
| Q14620 (SEQ ID NO:221) . . | | | |
| Alignment segment 1/1: | | | |
| Quality: | 561.00 | Escore: | 0 |
| Matching length: | 59 | Total length: | 59 |
| Matching Percent | 100.00 | Matching Percent | 96.61 |
| Similarity: | | Identity: | |
| Total Percent | 100.00 | Total Percent | 96.61 |
| Similarity: | | Identity: | |
| Gaps: | 0 | | |

| Alignment: | | |
|---|---|---|
| | . . . . . | |
| 1 | MITPTVKMHTMSSSHLFYLALCLLTFTSSATAGPETLCGAELVDALQFVC | 50 |
| | \|\|\|\|\|\|\|\|\|\|\|\|\|\|\|\|\|\|\|\|\|\|\|\|\|\|\|\|\|\|\|\|\|\|\|\|\|\|\|\|\|\|\|\|\|\|\|\|\|\| | |
| 1 | MITPTVKMHTMSSSHLFYLALCLLTFTSSATAGPETLCGAELVDALQFVC | 50 |
| 51 | GDRGFYFSR | 59 |
| | \|\|\|\|\|\|\|:: | |
| 51 | GDRGFYFNK | 59 |

| Sequence name: IGFB_HUMAN (SEQ ID NO:220) | | | |
|---|---|---|---|
| Sequence documentation: | | | |
| Alignment of: HSIGFACI_PEA_1_P8 (SEQ ID NO:230) × | | | |
| IGFB_HUMAN (SEQ ID NO:220) . . | | | |
| Alignment segment 1/1: | | | |
| Quality: | 511.00 | Escore: | 0 |
| Matching length: | 54 | Total length: | 54 |
| Matching Percent | 100.00 | Matching Percent | 96.30 |
| Similarity: | | Identity: | |
| Total Percent | 100.00 | Total Percent | 96.30 |
| Similarity: | | Identity: | |
| Gaps: | 0 | | |

| Alignment: | | |
|---|---|---|
| | . . . . . | |
| 6 | VKMHTMSSSHLFYLALCLLTFTSSATAGPETLCGAELVDALQFVCGDRGF | 55 |
| | \|\|\|\|\|\|\|\|\|\|\|\|\|\|\|\|\|\|\|\|\|\|\|\|\|\|\|\|\|\|\|\|\|\|\|\|\|\|\|\|\|\|\|\|\|\|\|\|\|\| | |
| 22 | VKMHTMSSSHLFYLALCLLTFTSSATAGPETLCGAELVDALQFVCGDRGF | 71 |
| 56 | YFSR | 59 |
| | \|\|:: | |
| 72 | YFNK | 75 |

| Sequence name: IGFA_HUMAN (SEQ ID NO:223) | | | |
|---|---|---|---|
| Sequence documentation: | | | |
| Alignment of: HSIGFACI_PEA_1_P8 (SEQ ID NO:230) × | | | |
| IGFA HUMAN (SEQ ID NO:223) . . | | | |
| Alignment segment 1/1: | | | |
| Quality: | 511.00 | Escore: | 0 |
| Matching length: | 54 | Total length: | 54 |
| Matching Percent | 100.00 | Matching Percent | 96.30 |
| Similarity: | | Identity: | |
| Total Percent | 100.00 | Total Percent | 96.30 |
| Similarity: | | Identity: | |
| Gaps: | 0 | | |

| Alignment: | | |
|---|---|---|
| | . . . . . | |
| 6 | VKMHTMSSSHLFYLALCLLTFTSSATAGPETLCGAELVDALQFVCGDRGF | 55 |
| | \|\|\|\|\|\|\|\|\|\|\|\|\|\|\|\|\|\|\|\|\|\|\|\|\|\|\|\|\|\|\|\|\|\|\|\|\|\|\|\|\|\|\|\|\|\|\|\|\|\| | |
| 22 | VKMHTMSSSHLFYLALCLLTFTSSATAGPETLCGAELVDALQFVCGDRGF | 71 |
| 56 | YFSR | 59 |
| | \|\|:: | |
| 72 | YFNK | 75 |

### Description for Cluster HSSTROMR

[0900] Cluster HSSTROMR features 1 transcript(s) and 11 segment(s) of interest, the names for which are given in Tables 1 and 2, respectively, the sequences themselves are given at the end of the application. The selected protein variants are given in table 3.

TABLE 1
Transcripts of interest

| Transcript Name | Sequence ID No. |
|---|---|
| HSSTROMR_PEA_1_T3 | 231 |

[0901] TABLE 2
Segments of interest

| Segment Name | Sequence ID No. |
|---|---|
| HSSTROMR_PEA_1_node_0 | 232 |
| HSSTROMR_PEA_1_node_5 | 233 |
| HSSTROMR_PEA_1_node_7 | 234 |
| HSSTROMR_PEA_1_node_9 | 235 |
| HSSTROMR_PEA_1_node_13 | 236 |
| HSSTROMR_PEA_1_node_16 | 237 |
| HSSTROMR_PEA_1_node_18 | 238 |
| HSSTROMR_PEA_1_node_20 | 239 |
| HSSTROMR_PEA_1_node_28 | 240 |
| HSSTROMR_PEA_1_node_14 | 241 |
| HSSTROMR_PEA_1_node_22 | 242 |

[0902] TABLE 3
Proteins of interest

| | Sequence | |
|---|---|---|
| Protein Name | ID No. | Corresponding Transcript(s) |
| HSSTROMR_PEA_1_P4 | 244 | HSSTROMR_PEA_1_T3 |
| | | (SEQ ID NO: 231) |

[0903] These sequences are variants of the known protein Stromelysin-1 precursor (SEQ ID NO:243) (SwissProt accession identifier MM03_HUMAN; known also according to the synonyms EC 3.4.24.17; Matrix metalloproteinase-3; MMP-3; Transin-1; SL-1), referred to herein as the previously known protein.

[0904] Protein Stromelysin-1 precursor (SEQ ID NO:243) is known or believed to have the following function(s): can degrade fibronectin, laminin, gelatins of type I, III, IV, and V; collagens III, IV, X, and IX, and cartilage proteoglycans. Activates procollagenase. The sequence for protein Stromelysin-1 precursor is given at the end of the application, as “Stromelysin-1 precursor amino acid sequence” (SEQ ID NO:243). Known polymorphisms for this sequence are as shown in Table 4.

TABLE 4
Amino acid mutations for Known Protein

| SNP position(s) on | |
|---|---|
| amino acid sequence | Comment |
| 45 | K -> E. /FTId = VAR_013090. |
| 420 | P -> L |

[0905] The following GO Annotation(s) apply to the previously known protein. The following annotation(s) were found: proteolysis and peptidolysis, which are annotation(s) related to Biological Process; stromelysin 1; calcium binding; zinc binding; hydrolase, which are annotation(s) related to Molecular Function; and extracellular matrix; extracellular space, which are annotation(s) related to Cellular Component.

[0906] The GO assignment relies on information from one or more of the SwissProt/TremBl Protein knowledgebase, available from <http://www.expasy.ch/sprot/>; or Locuslink, available from <http://www.ncbi.nlm.nih.gov/projects/LocusLink/>.

[0907] This protein was found to be upregulated in endometriosis (Yang et al, Best Pract Res Clin Obstet Gynaecol. 2004 April; 18(2):305-18). Variants of this cluster are suitable for use as diagnostic markers for endometriosis.

[0908] As noted above, cluster HSSTROMR features 1 transcript(s), which were listed in Table 1 above. These transcript(s) encode for protein(s) which are variant(s) of protein Stromelysin-1 precursor (SEQ ID NO:243). A description of each variant protein according to the present invention is now provided.

[0909] Variant protein HSSTROMR_PEA_{—}1_P4 (SEQ ID NO:244) according to the present invention has an amino acid sequence as given at the end of the application; it is encoded by transcript(s) HSSTROMR_PEA_{—}1_T3 (SEQ ID NO:231). An alignment is given to the known protein (Stromelysin-1 precursor (SEQ ID NO:243)) at the end of the application. One or more alignments to one or more previously published protein sequences are given at the end of the application. A brief description of the relationship of the variant protein according to the present invention to each such aligned protein is as follows:

[0910] Comparison report between HSSTROMR_PEA_{—}1_P4 (SEQ ID NO:244) and MM03_HUMAN (SEQ ID NO:243):

[0911] 1. An isolated chimeric polypeptide encoding for HSSTROMR_PEA_{—}1_P4 (SEQ ID NO:244), comprising a first amino acid sequence being at least 90% homologous to MKSLPILLLLCVAVCSAYPLDGAARGEDTSMNLV corresponding to amino acids 1-34 of MM03_HUMAN (SEQ ID NO:243), which also corresponds to amino acids 1-34 of HSSTROMR_PEA_{—}1_P4 (SEQ ID NO:244), and a second amino acid sequence being at least 90% homologous to QKFLGLEVTGKLDSDTLEVMRKPRCGVPDVGHFRTFPGIPKWRKTHLTYRIVNYTPDLP KDAVDSAVEKALKVWEEVTPLTFSRLYEGEADIMISFAVREHGDFYPFDGPGNVLAHA YAPGPGINGDAHFDDDEQWTKDTTGTNLFLVAAHEIGHSLGLFHSANTEALMYPLYHS LTDLTRFRLSQDDINGIQSLYGPPPDSPETPLVPTEPVPPEPGTPANCDPALSFDAVSTLR GEILIFKDRHFWRKSLRKLEPELHLISSFWPSLPSGVDAAYEVTSKDLVFIFKGNQFWAIR GNEVRAGYPRGIHTLGFPPTVRKIDAAISDKEKNKTYFFVEDKYWRFDEKRNSMEPGFP KQIAEDFPGIDSKIDAVFEEFGFFYFFTGSSQLEFDPNAKKVTHTLKSNSWLNC corresponding to amino acids 68-477 of MM03_HUMAN (SEQ ID NO:243), which also corresponds to amino acids 35-444 of HSSTROMR_PEA_{—}1_P4 (SEQ ID NO:244), wherein said first amino acid sequence and second amino acid sequence are contiguous and in a sequential order.

[0912] 2. An isolated chimeric polypeptide encoding for an edge portion of HSSTROMR_PEA_{—}1_P4 (SEQ ID NO:244), comprising a polypeptide having a length “n”, wherein n is at least about 10 amino acids in length, optionally at least about 20 amino acids in length, preferably at least about 30 amino acids in length, more preferably at least about 40 amino acids in length and most preferably at least about 50 amino acids in length, wherein at least two amino acids comprise VQ, having a structure as follows: a sequence starting from any of amino acid numbers 34−x to 34; and ending at any of amino acid numbers 35+((n−2)−x), in which x varies from 0 to n−2.

[0913] The location of the variant protein was determined according to results from a number of different software programs and analyses, including analyses from SignalP and other specialized programs. The variant protein is believed to be located as follows with regard to the cell: secreted. The protein localization is believed to be secreted because both signal-peptide prediction programs predict that this protein has a signal peptide, and neither trans-membrane region prediction program predicts that this protein has a trans-membrane region.

[0914] Variant protein HSSTROMR_PEA_{—}1_P4 (SEQ ID NO:244) also has the following non-silent SNPs (Single Nucleotide Polymorphisms) as listed in Table 5, (given according to their position(s) on the amino acid sequence, with the alternative amino acid(s) listed; the last column indicates whether the SNP is known or not; the presence of known SNPs in variant protein HSSTROMR_PEA_{—}1_P4 (SEQ ID NO:244) Sequence provides support for the deduced sequence of this variant protein according to the present invention).

TABLE 5
Amino acid mutations

| SNP position(s) on | Alternative | Previously |
|---|---|---|
| amino acid sequence | amino acid(s) | known SNP? |
| 29 | T -> N | No |
| 38 | L -> P | No |
| 38 | L -> | No |
| 48 | S -> F | No |
| 56 | K -> | No |
| 56 | K -> N | No |
| 80 | H -> P | Yes |
| 147 | V -> | No |
| 254 | P -> A | No |
| 366 | K -> | No |
| 413 | F -> L | No |
| 413 | F -> V | No |
| 427 | P -> | No |

[0915] The glycosylation sites of variant protein HSSTROMR_PEA_{—}1_P4 (SEQ ID NO:244), as compared to the known protein Stromelysin-1 precursor (SEQ ID NO:243), are described in Table 6 (given according to their position(s) on the amino acid sequence in the first column; the second column indicates whether the glycosylation site is present in the variant protein; and the last column indicates whether the position is different on the variant protein).

TABLE 6
Glycosylation site(s)

| Position(s) on known | Present in variant | Position in variant |
|---|---|---|
| amino acid sequence | protein? | protein? |
| 120 | yes | 87 |

[0916] Variant protein HSSTROMR_PEA_{—}1_P4 (SEQ ID NO:244) is encoded by the following transcript(s): HSSTROMR_PEA_{—}1_T3 (SEQ ID NO:231), for which the sequence(s) is/are given at the end of the application. The coding portion of transcript HSSTROMR_PEA_{—}1_T3 (SEQ ID NO:231) is shown in bold; this coding portion starts at position 70 and ends at position 1401. The transcript also has the following SNPs as listed in Table 7 (given according to their position on the nucleotide sequence, with the alternative nucleic acid listed; the last column indicates whether the SNP is known or not; the presence of known SNPs in variant protein HSSTROMR_PEA_{—}1_P4 (SEQ ID NO:244) Sequence provides support for the deduced sequence of this variant protein according to the present invention).

TABLE 7
Nucleic acid SNPs

| SNP position on nucleotide | Alternative | Previously known |
|---|---|---|
| sequence | nucleic acid | SNP? |
| 49 | A -> G | No |
| 155 | C -> A | No |
| 182 | T -> | No |
| 182 | T -> C | No |
| 212 | C -> T | No |
| 237 | G -> | No |
| 237 | G -> C | No |
| 258 | C -> T | Yes |
| 276 | C -> G | No |
| 308 | A -> C | Yes |
| 509 | T -> | No |
| 762 | A -> G | Yes |
| 829 | C -> G | No |
| 1056 | C -> T | Yes |
| 1165 | A -> | No |
| 1306 | T -> C | No |
| 1306 | T -> G | No |
| 1350 | A -> | No |
| 1425 | A -> | No |
| 1437 | T -> | No |
| 1518 | C -> T | Yes |
| 1538 | C -> T | Yes |
| 1557 | G -> A | Yes |

[0917] As noted above, cluster HSSTROMR features 11 segment(s), which were listed in Table 2 above and for which the sequence(s) are given at the end of the application. These segment(s) are portions of nucleic acid sequence(s) which are described herein separately because they are of particular interest. A description of each segment according to the present invention is now provided.

[0918] Segment cluster HSSTROMR_PEA_{—}1_node_{—}0 (SEQ ID NO:232) according to the present invention is supported by 39 libraries. The number of libraries was determined as previously described. This segment can be found in the following transcript(s): HSSTROMR_PEA_{—}1_T3 (SEQ ID NO:231). Table 8 below describes the starting and ending position of this segment on each transcript.

TABLE 8
Segment location on transcripts

| | Segment | Segment |
|---|---|---|
| Transcript name | starting position | ending position |
| HSSTROMR_PEA_1_T3 (SEQ ID | 1 | 174 |
| NO: 231) | | |

[0919] Segment cluster HSSTROMR_PEA_{—}1_node_{—}5 (SEQ ID NO:233) according to the present invention is supported by 45 libraries. The number of libraries was determined as previously described. This segment can be found in the following transcript(s): HSSTROMR_PEA_{—}1_T3 (SEQ ID NO:231). Table 9 below describes the starting and ending position of this segment on each transcript.

TABLE 9
Segment location on transcripts

| | Segment | Segment |
|---|---|---|
| Transcript name | starting position | ending position |
| HSSTROMR_PEA_1_T3 (SEQ ID | 175 | 320 |
| NO: 231) | | |

[0920] Segment cluster HSSTROMR_PEA_{—}1_node_{—}7 (SEQ ID NO:234) according to the present invention is supported by 41 libraries. The number of libraries was determined as previously described. This segment can be found in the following transcript(s): HSSTROMR_PEA_{—}1_T3 (SEQ ID NO:231). Table 10 below describes the starting and ending position of this segment on each transcript.

TABLE 10
Segment location on transcripts

| | Segment | Segment |
|---|---|---|
| Transcript name | starting position | ending position |
| HSSTROMR_PEA_1_T3 (SEQ ID | 321 | 469 |
| NO: 231) | | |

[0921] Segment cluster HSSTROMR_PEA_{—}1_node_{—}9 (SEQ ID NO:235) according to the present invention is supported by 40 libraries. The number of libraries was determined as previously described. This segment can be found in the following transcript(s): HSSTROMR_PEA_{—}1_T3 (SEQ ID NO:231). Table 11 below describes the starting and ending position of this segment on each transcript.

TABLE 11
Segment location on transcripts

| | Segment | Segment |
|---|---|---|
| Transcript name | starting position | ending position |
| HSSTROMR_PEA_1_T3 (SEQ ID | 470 | 595 |
| NO: 231) | | |

[0922] Segment cluster HSSTROMR_PEA_{—}1_node_{—}13 (SEQ ID NO:236) according to the present invention is supported by 46 libraries. The number of libraries was determined as previously described. This segment can be found in the following transcript(s): HSSTROMR_PEA_{—}1_T3 (SEQ ID NO:231). Table 12 below describes the starting and ending position of this segment on each transcript.

TABLE 12
Segment location on transcripts

| | Segment | Segment |
|---|---|---|
| Transcript name | starting position | ending position |
| HSSTROMR_PEA_1_T3 (SEQ ID | 596 | 730 |
| NO: 231) | | |

[0923] Segment cluster HSSTROMR_PEA_{—}1_node_{—}16 (SEQ ID NO:237) according to the present invention is supported by 43 libraries. The number of libraries was determined as previously described. This segment can be found in the following transcript(s): HSSTROMR_PEA_{—}1_T3 (SEQ ID NO:231). Table 13 below describes the starting and ending position of this segment on each transcript.

TABLE 13
Segment location on transcripts

| | Segment | Segment |
|---|---|---|
| Transcript name | starting position | ending position |
| HSSTROMR_PEA_1_T3 (SEQ ID | 761 | 905 |
| NO: 231) | | |

[0924] Segment cluster HSSTROMR_PEA_{—}1_node_{—}18 (SEQ ID NO:238) according to the present invention is supported by 45 libraries. The number of libraries was determined as previously described. This segment can be found in the following transcript(s): HSSTROMR_PEA_{—}1_T3 (SEQ ID NO:231). Table 14 below describes the starting and ending position of this segment on each transcript.

TABLE 14
Segment location on transcripts

| | Segment | Segment |
|---|---|---|
| Transcript name | starting position | ending position |
| HSSTROMR_PEA_1_T3 (SEQ ID | 906 | 1039 |
| NO: 231) | | |

[0925] Segment cluster HSSTROMR_PEA_{—}1_node_{—}20 (SEQ ID NO:239) according to the present invention is supported by 57 libraries. The number of libraries was determined as previously described. This segment can be found in the following transcript(s): HSSTROMR_PEA_{—}1_T3 (SEQ ID NO:231). Table 15 below describes the starting and ending position of this segment on each transcript.

TABLE 15
Segment location on transcripts

| | Segment | Segment |
|---|---|---|
| Transcript name | starting position | ending position |
| HSSTROMR_PEA_1_T3 (SEQ ID | 1040 | 1199 |
| NO: 231) | | |

[0926] Segment cluster HSSTROMR_PEA_{—}1_node_{—}28 (SEQ ID NO:240) according to the present invention is supported by 66 libraries. The number of libraries was determined as previously described. This segment can be found in the following transcript(s): HSSTROMR_PEA_{—}1_T3 (SEQ ID NO:231). Table 16 below describes the starting and ending position of this segment on each transcript.

TABLE 16
Segment location on transcripts

| | Segment | Segment |
|---|---|---|
| Transcript name | starting position | ending position |
| HSSTROMR_PEA_1_T3 (SEQ ID | 1304 | 1738 |
| NO: 231) | | |

[0927] According to an optional embodiment of the present invention, short segments related to the above cluster are also provided. These segments are up to about 120 bp in length, and so are included in a separate description.

[0928] Segment cluster HSSTROMR_PEA_{—}1_node_{—}14 (SEQ ID NO:241) according to the present invention is supported by 42 libraries. The number of libraries was determined as previously described. This segment can be found in the following transcript(s): HSSTROMR_PEA_{—}1_T3 (SEQ ID NO:231). Table 17 below describes the starting and ending position of this segment on each transcript.

TABLE 17
Segment location on transcripts

| | Segment | Segment |
|---|---|---|
| Transcript name | starting position | ending position |
| HSSTROMR_PEA_1_T3 (SEQ ID | 731 | 760 |
| NO: 231) | | |

[0929] Segment cluster HSSTROMR_PEA_{—}1_node_{—}22 (SEQ ID NO:242) according to the present invention is supported by 58 libraries. The number of libraries was determined as previously described. This segment can be found in the following transcript(s): HSSTROMR_PEA_{—}1_T3 (SEQ ID NO:231). Table 18 below describes the starting and ending position of this segment on each transcript.

TABLE 18
Segment location on transcripts

| | Segment | Segment |
|---|---|---|
| Transcript name | starting position | ending position |
| HSSTROMR_PEA_1_T3 (SEQ ID | 1200 | 1303 |
| NO: 231) | | |

[0930] Variant protein alignment to the previously known protein: Sequence name: MM03_HUMAN (SEQ ID NO:243)

| Sequence name: MN03_HUMAN (SEQ ID NO:243) | | | |
|---|---|---|---|
| Sequence documentation: | | | |
| Alignment of: HSSTROMR_PEA_1_P4 (SEQ ID NO:244) × | | | |
| MN03_HUMAN (SEQ ID NO:243) . . | | | |
| Alignment segment 1/1: | | | |
| Quality: | 4302.00 | Escore: | 0 |
| Matching length: | 444 | Total length: | 477 |
| Matching Percent | 100.00 | Matching Percent | 100.00 |
| Similarity: | | Identity: | |
| Total Percent | 93.08 | Total Percent | 93.08 |
| Similarity: | | Identity: | |
| Gaps: | 1 | | |

| Alignment: | | |
|---|---|---|
| | . . . . . | |
| 1 | MKSLPILLLLCVAVCSAYPLDGAARGEDTSMNLV................ | 34 |
| | \|\|\|\|\|\|\|\|\|\|\|\|\|\|\|\|\|\|\|\|\|\|\|\|\|\|\|\|\|\|\|\|\|\| | |
| 1 | MKSLPILLLLCVAVCSAYPLDGAARGEDTSMNLVQKYLENYYDLKKDVKQ | 50 |
| | . . . . . | |
| 35 | .................QKFLGLEVTGKLDSDTLEVMRKPRCGVPDVGHF | 67 |
| | \|\|\|\|\|\|\|\|\|\|\|\|\|\|\|\|\|\|\|\|\|\|\|\|\|\|\|\|\|\|\|\|\| | |
| 51 | FVRRKDSGPVVKKIREMQKFLGLEVTGKLDSDTLEVMRKPRCGVPDVGHF | 100 |
| | . . . . . | |
| 68 | RTFPGIPKWRKTHLTYRIVNYTPDLPKDAVDSAVEKALKVWEEVTPLTFS | 117 |
| | \|\|\|\|\|\|\|\|\|\|\|\|\|\|\|\|\|\|\|\|\|\|\|\|\|\|\|\|\|\|\|\|\|\|\|\|\|\|\|\|\|\|\|\|\|\|\|\|\|\| | |
| 101 | RTFPGIPKWRKTHLTYRIVNYTPDLPKDAVDSAVEKALKVWEEVTPLTFS | 150 |
| | . . . . . | |
| 118 | RLYEGEADIMISFAVREHGDFYPFDGPGNVLAHAYAPGPGINGDAHFDDD | 167 |
| | \|\|\|\|\|\|\|\|\|\|\|\|\|\|\|\|\|\|\|\|\|\|\|\|\|\|\|\|\|\|\|\|\|\|\|\|\|\|\|\|\|\|\|\|\|\|\|\|\|\| | |
| 151 | RLYEGEADIMISFAVREHGDFYPFDGPGNVLAHAYAPGPGINGDAHFDDD | 200 |
| | . . . . . | |
| 168 | EQWTKDTTGTNLFLVAAHEIGHSLGLFHSANTEALMYPLYHSLTDLTRFR | 217 |
| | \|\|\|\|\|\|\|\|\|\|\|\|\|\|\|\|\|\|\|\|\|\|\|\|\|\|\|\|\|\|\|\|\|\|\|\|\|\|\|\|\|\|\|\|\|\|\|\|\|\| | |
| 201 | EQWTKDTTGTNLFLVAAHEIGHSLGLFHSANTEALMYPLYHSLTDLTRFR | 250 |
| | . . . . . | |
| 218 | LSQDDINGIQSLYGPPPDSPETPLVPTEPVPPEPGTPANCDPALSFDAVS | 267 |
| | \|\|\|\|\|\|\|\|\|\|\|\|\|\|\|\|\|\|\|\|\|\|\|\|\|\|\|\|\|\|\|\|\|\|\|\|\|\|\|\|\|\|\|\|\|\|\|\|\|\| | |
| 251 | LSQDDINGIQSLYGPPPDSPETPLVPTEPVPPEPGTPANCDPALSFDAVS | 300 |
| | . . . . . | |
| 268 | TLRGEILIFKDRHFWRKSLRKLEPELHLISSFWPSLPSGVDAAYEVTSKD | 317 |
| | \|\|\|\|\|\|\|\|\|\|\|\|\|\|\|\|\|\|\|\|\|\|\|\|\|\|\|\|\|\|\|\|\|\|\|\|\|\|\|\|\|\|\|\|\|\|\|\|\|\| | |
| 301 | TLRGEILIFKDRHFWRKSLRKLEPELHLISSFWPSLPSGVDAAYEVTSKD | 350 |
| | . . . . . | |
| 318 | LVFIFKGNQFWAIRGNEVRAGYPRGIHTLGFPPTVRKIDAAISDKEKNKT | 367 |
| | \|\|\|\|\|\|\|\|\|\|\|\|\|\|\|\|\|\|\|\|\|\|\|\|\|\|\|\|\|\|\|\|\|\|\|\|\|\|\|\|\|\|\|\|\|\|\|\|\|\| | |
| 351 | LVFIFKGNQFWAIRGNEVRAGYPRGIHTLGFPPTVRKIDAAISDKEKNKT | 400 |
| | . . . . . | |
| 368 | YFFVEDKYWRFDEKRNSMEPGFPKQIAEDFFGIDSKIDAVFEEFGFFYFF | 417 |
| | \|\|\|\|\|\|\|\|\|\|\|\|\|\|\|\|\|\|\|\|\|\|\|\|\|\|\|\|\|\|\|\|\|\|\|\|\|\|\|\|\|\|\|\|\|\|\|\|\|\| | |
| 401 | YFFVEDKYWRFDEKRNSMEPGFPKQIAEDFPGIDSKIDAVFEEFGFFYFF | 450 |
| | . . | |
| 418 | TGSSQLEFDPNAKKVTHTLKSNSWLNC | 444 |
| | \|\|\|\|\|\|\|\|\|\|\|\|\|\|\|\|\|\|\|\|\|\|\|\|\|\|\| | |
| 451 | TGSSQLEFDPNAKKVTHTLKSNSWLNC | 477 |

### Description for Cluster HUM4COLA

[0931] Cluster HUM4COLA features 3 transcript(s) and 27 segment(s) of interest, the names for which are given in Tables 1 and 2, respectively, the sequences themselves are given at the end of the application. The selected protein variants are given in table 3.

TABLE 1
Transcripts of interest

| Transcript Name | Sequence ID No. |
|---|---|
| HUM4COLA_PEA_1_T1 | 245 |
| HUM4COLA_PEA_1_T5 | 246 |
| HUM4COLA_PEA_1_T6 | 247 |

[0932] TABLE 2
Segments of interest

| Segment Name | Sequence ID No. |
|---|---|
| HUM4COLA_PEA_1_node_0 | 248 |
| HUM4COLA_PEA_1_node_2 | 249 |
| HUM4COLA_PEA_1_node_4 | 250 |
| HUM4COLA_PEA_1_node_7 | 251 |
| HUM4COLA_PEA_1_node_11 | 252 |
| HUM4COLA_PEA_1_node_19 | 253 |
| HUM4COLA_PEA_1_node_40 | 254 |
| HUM4COLA_PEA_1_node_41 | 255 |
| HUM4COLA_PEA_1_node_8 | 256 |
| HUM4COLA_PEA_1_node_9 | 257 |
| HUM4COLA_PEA_1_node_10 | 258 |
| HUM4COLA_PEA_1_node_12 | 259 |
| HUM4COLA_PEA_1_node_13 | 260 |
| HUM4COLA_PEA_1_node_16 | 261 |
| HUM4COLA_PEA_1_node_17 | 262 |
| HUM4COLA_PEA_1_node_22 | 263 |
| HUM4COLA_PEA_1_node_23 | 264 |
| HUM4COLA_PEA_1_node_24 | 265 |
| HUM4COLA_PEA_1_node_25 | 266 |
| HUM4COLA_PEA_1_node_26 | 267 |
| HUM4COLA_PEA_1_node_27 | 268 |
| HUM4COLA_PEA_1_node_29 | 269 |
| HUM4COLA_PEA_1_node_30 | 270 |
| HUM4COLA_PEA_1_node_32 | 271 |
| HUM4COLA_PEA_1_node_33 | 272 |
| HUM4COLA_PEA_1_node_36 | 273 |
| HUM4COLA_PEA_1_node_37 | 274 |

[0933] TABLE 3
Proteins of interest

| | Sequence ID | |
|---|---|---|
| Protein Name | No. | Corresponding Transcript(s) |
| HUM4COLA_PEA_1_P7 | 276 | HUM4COLA_PEA_1_T6 |
| | | (SEQ ID NO: 247) |
| HUM4COLA_PEA_1_P14 | 277 | HUM4COLA_PEA_1_T1 |
| | | (SEQ ID NO: 245) |
| HUM4COLA_PEA_1_P15 | 278 | HUM4COLA_PEA_1_T5 |
| | | (SEQ ID NO: 246) |

[0934] These sequences are variants of the known protein 92 kDa type IV collagenase precursor (SEQ ID NO:275) (SwissProt accession identifier MM09_HUMAN; known also according to the synonyms EC 3.4.24.35; 92 kDa gelatinase; Matrix metalloproteinase-9; MMP-9; Gelatinase B; GELB), referred to herein as the previously known protein.

[0935] Protein 92 kDa type IV collagenase precursor (SEQ ID NO:275) is known or believed to have the following function(s): could play a role in bone osteoclastic resorption. The sequence for protein 92 kDa type IV collagenase precursor is given at the end of the application, as “92 kDa type IV collagenase precursor amino acid sequence” (SEQ ID NO:275). Known polymorphisms for this sequence are as shown in Table 4.

TABLE 4
Amino acid mutations for Known Protein

| SNP position(s) | |
|---|---|
| on amino acid | |
| sequence | Comment |
| 20 | A -> V (in dbSNP: 1805088). /FTId = VAR_013780. |
| 82 | E -> K (in dbSNP: 1805089). /FTId = VAR_013781. |
| 279 | R -> Q (common polymorphism; dbSNP: 17576). |
| | /FTId = VAR_013782. |
| 668 | R -> Q (in dbSNP: 17577). /FTId = VAR_014742. |
| 574 | P -> R |

[0936] The previously known protein also has the following indication(s) and/or potential therapeutic use(s): Peyronie's disease; Burns; Glaucoma; Wound healing; Ulcer; Dupuytren's disease. It has been investigated for clinical/therapeutic use in humans, for example as a target for an antibody or small molecule, and/or as a direct therapeutic; available information related to these investigations is as follows. Potential pharmaceutically related or therapeutically related activity or activities of the previously known protein are as follows: Collagenase stimulant; Metalloproteinase-9 inhibitor; Microbial collagenase inhibitor; T cell stimulant. A therapeutic role for a protein represented by the cluster has been predicted. The cluster was assigned this field because there was information in the drug database or the public databases (e.g., described herein above) that this protein, or part thereof, is used or can be used for a potential therapeutic indication: Urological; Anticancer; Vulnerary; Musculoskeletal; Antiglaucoma; Neurological; Anti-inflammatory; Diagnostic; Monoclonal antibody, murine.

[0937] The following GO Annotation(s) apply to the previously known protein. The following annotation(s) were found: proteolysis and peptidolysis, which are annotation(s) related to Biological Process; gelatinase B; collagenase; zinc binding; hydrolase, which are annotation(s) related to Molecular Function; and extracellular matrix; extracellular space, which are annotation(s) related to Cellular Component.

[0938] The GO assignment relies on information from one or more of the SwissProt/TremBl Protein knowledgebase, available from <http://www.expasy.ch/sprot/>; or Locuslink, available from <http://www.ncbi.nlm.nih.gov/projects/LocusLink/>.

[0939] For the known protein, mRNA expression in endometriosis was higher than in normal endometrium (Ueda et al, Gynecol Endocrinol. 2002 October; 16(5):391-402). Variants of this cluster are suitable as diagnostic markers for endometriosis.

[0940] As noted above, cluster HUM4COLA features 3 transcript(s), which were listed in Table 1 above. These transcript(s) encode for protein(s) which are variant(s) of protein 92 kDa type IV collagenase precursor (SEQ ID NO:275). A description of each variant protein according to the present invention is now provided.

[0941] Variant protein HUM4COLA_PEA_{—}1_P7 (SEQ ID NO:276) according to the present invention has an amino acid sequence as given at the end of the application; it is encoded by transcript(s) HUM4COLA_PEA_{—}1_T6 (SEQ ID NO:247). An alignment is given to the known protein (92 kDa type IV collagenase precursor (SEQ ID NO:275)) at the end of the application. One or more alignments to one or more previously published protein sequences are given at the end of the application. A brief description of the relationship of the variant protein according to the present invention to each such aligned protein is as follows:

[0942] Comparison report between HUM4COLA_PEA_{—}1_P7 (SEQ ID NO:276) and MM09_HUMAN (SEQ ID NO:275):

[0943] 1. An isolated chimeric polypeptide encoding for HUM4COLA_PEA_{—}1_P7 (SEQ ID NO:276), comprising a first amino acid sequence being at least 90% homologous to MSLWQPLVLVLLVLGCCFAAPRQRQSTLVLFPGDLRTNLTDRQLAEEYLYRYGYTRVA EMRGESKSLGPALLLLQKQLSLPETGELDSATLKAMRTPRCGVPDLGRFQTFEGDLKW HHHNITYWIQNYSEDLPRAVIDDAFARAFALWSAVTPLTFTRVYSRDADIVIQFGVAEH GDGYPFDGKDGLLAHAFPPGPGIQGDAHFDDDELWSLGKGVVVPTRFGNADGAACHF PFIFEGRSYSACTTDGRSDGLPWCSTTANYDTDDRFGFCPSERLYTRDGNADGKPCQFP FIFQGQSYSACTTDGRSDGYRWCATTANYDRDKLFGFCPTRADSTVMGGNSAGELCVF PFTFLGKE corresponding to amino acids 1-357 of MM09_HUMAN (SEQ ID NO:275), which also corresponds to amino acids 1-357 of HUM4COLA_PEA_{—}1_P7 (SEQ ID NO:276), and a second amino acid sequence being at least 70%, optionally at least 80%, preferably at least 85%, more preferably at least 90% and most preferably at least 95% homologous to a polypeptide having the sequence SSP (SEQ ID NO:481) corresponding to amino acids 358-360 of HUM4COLA_PEA_{—}1_P7 (SEQ ID NO:276), wherein said first amino acid sequence and second amino acid sequence are contiguous and in a sequential order.

[0944] 2. An isolated polypeptide encoding for a tail of HUM4COLA PEA_{—}1_P7 (SEQ ID NO:276), comprising a polypeptide being at least 70%, optionally at least about 80%, preferably at least about 85%, more preferably at least about 90% and most preferably at least about 95% homologous to the sequence SSP (SEQ ID NO:481) in HUM4COLA_PEA_{—}1_P7 (SEQ ID NO:276).

[0945] The location of the variant protein was determined according to results from a number of different software programs and analyses, including analyses from SignalP and other specialized programs. The variant protein is believed to be located as follows with regard to the cell: secreted. The protein localization is believed to be secreted because both signal-peptide prediction programs predict that this protein has a signal peptide, and neither trans-membrane region prediction program predicts that this protein has a trans-membrane region.

[0946] Variant protein HUM4COLA_PEA_{—}1_P7 (SEQ ID NO:276) also has the following non-silent SNPs (Single Nucleotide Polymorphisms) as listed in Table 7, (given according to their position(s) on the amino acid sequence, with the alternative amino acid(s) listed; the last column indicates whether the SNP is known or not; the presence of known SNPs in variant protein HUM4COLA_PEA_{—}1_P7 (SEQ ID NO:276) Sequence provides support for the deduced sequence of this variant protein according to the present invention).

TABLE 7
Amino acid mutations

| SNP position(s) on amino acid | Alternative amino | Previously known |
|---|---|---|
| sequence | acid(s) | SNP? |
| 6 | P -> | No |
| 20 | A -> | No |
| 20 | A -> V | Yes |
| 65 | K -> E | No |
| 82 | E -> G | No |
| 82 | E -> K | Yes |
| 113 | D -> | No |
| 127 | N -> K | Yes |
| 160 | Y -> * | Yes |
| 165 | D -> N | Yes |
| 170 | F -> | No |
| 174 | E -> | No |
| 190 | H -> R | No |
| 205 | D -> G | No |
| 222 | F -> L | No |
| 229 | A -> | No |
| 237 | E -> | No |
| 255 | W -> R | No |
| 279 | R -> Q | Yes |
| 296 | G -> | No |
| 306 | G -> | No |
| 313 | W -> | No |

[0947] The glycosylation sites of variant protein HUM4COLA_PEA_{—}1_P7 (SEQ ID NO:276), as compared to the known protein 92 kDa type IV collagenase precursor (SEQ ID NO:275), are described in Table 8 (given according to their position(s) on the amino acid sequence in the first column; the second column indicates whether the glycosylation site is present in the variant protein; and the last column indicates whether the position is different on the variant protein).

TABLE 8
Glycosylation site(s)

| Position(s) on known amino | Present in variant | Position in variant |
|---|---|---|
| acid sequence | protein? | protein? |
| 38 | yes | 38 |
| 127 | yes | 127 |
| 120 | yes | 120 |

[0948] Variant protein HUM4COLA_PEA_{—}1_P7 (SEQ ID NO:276) is encoded by the following transcript(s): HUM4COLA_PEA_{—}1_T6 (SEQ ID NO:247), for which the sequence(s) is/are given at the end of the application. The coding portion of transcript HUM4COLA_PEA_{—}1_T6 (SEQ ID NO:247) is shown in bold; this coding portion starts at position 33 and ends at position 1112. The transcript also has the following SNPs as listed in Table 9 (given according to their position on the nucleotide sequence, with the alternative nucleic acid listed; the last column indicates whether the SNP is known or not; the presence of known SNPs in variant protein HUM4COLA_PEA_{—}1_P7 (SEQ ID NO:276) Sequence provides support for the deduced sequence of this variant protein according to the present invention).

TABLE 9
Nucleic acid SNPs

| SNP position on nucleotide | Alternative nucleic | Previously known |
|---|---|---|
| sequence | acid | SNP? |
| 48 | C -> | No |
| 91 | C -> | No |
| 91 | C -> T | Yes |
| 225 | A -> G | No |
| 276 | G -> A | Yes |
| 277 | A -> G | No |
| 371 | C -> | No |
| 413 | C -> G | Yes |
| 503 | T -> C | No |
| 512 | C -> G | Yes |
| 525 | G -> A | Yes |
| 540 | T -> | No |
| 554 | G -> | No |
| 601 | A -> G | No |
| 646 | A -> G | No |
| 698 | T -> G | No |
| 713 | -> A | No |
| 713 | -> T | No |
| 719 | C -> | No |
| 743 | G -> | No |
| 795 | T -> C | No |
| 868 | G -> A | Yes |
| 918 | G -> | No |
| 948 | G -> | No |
| 970 | G -> | No |
| 1112 | C -> T | Yes |
| 1118 | C -> T | Yes |
| 1409 | G -> | No |
| 1493 | C -> G | Yes |
| 1527 | C -> A | No |
| 1566 | G -> A | No |
| 1593 | A -> C | Yes |
| 1608 | G -> A | Yes |
| 1634 | G -> A | Yes |
| 1716 | C -> A | No |
| 1717 | G -> A | No |
| 1775 | G -> A | Yes |
| 1794 | C -> T | Yes |
| 1854 | G -> A | Yes |
| 1899 | C -> T | Yes |
| 1914 | G -> | No |
| 1935 | A -> C | Yes |
| 1952 | G -> A | Yes |
| 1992 | C -> T | Yes |
| 2042 | T -> C | Yes |
| 2086 | T -> | No |
| 2086 | T -> C | No |
| 2087 | T -> A | No |
| 2087 | T -> C | No |

[0949] Variant protein HUM4COLA_PEA_{—}1_P14 (SEQ ID NO:277) according to the present invention has an amino acid sequence as given at the end of the application; it is encoded by transcript(s) HUM4COLA_PEA_{—}1_T1 (SEQ ID NO:245). An alignment is given to the known protein (92 kDa type IV collagenase precursor (SEQ ID NO:275)) at the end of the application. One or more alignments to one or more previously published protein sequences are given at the end of the application. A brief description of the relationship of the variant protein according to the present invention to each such aligned protein is as follows:

[0950] Comparison report between HUM4COLA_PEA_{—}1_P14 (SEQ ID NO:277) and MM09_HUMAN (SEQ ID NO:275):

[0951] 1. An isolated chimeric polypeptide encoding for HUM4COLA_PEA_{—}1_P14 (SEQ ID NO:277), comprising a first amino acid sequence being at least 90% homologous to MSLWQPLVLVLLVLGCCFAAPRQRQSTLVLFPGDLRTNLTDRQLAEEYLYRYGYTRVA EMRGESKSLGPALLLLQKQLSLPETGELDSATLKAMRTPRCGVPDLGRFQTFEGDLKW HHHNITYWIQNYSEDLPRAVIDDAFARAFALWSAVTPLTFTRVYSRDADIVIQFGVAEH GDGYPFDGKDGLLAHAFPPGPGIQGDAHFDDDELWSLGKGVVVPTRFGNADGAACHF PFIFEGRSYSACTTDGRSDGLPWCSTTANYDTDDRFGFCPSE corresponding to amino acids 1-274 of MM09_HUMAN (SEQ ID NO:275), which also corresponds to amino acids 1-274 of HUM4COLA_PEA_{—}1_P14 (SEQ ID NO:277), and a second amino acid sequence being at least 70%, optionally at least 80%, preferably at least 85%, more preferably at least 90% and most preferably at least 95% homologous to a polypeptide having the sequence SE corresponding to amino acids 275-276 of HUM4COLA_PEA_{—}1_P14 (SEQ ID NO:277), wherein said first amino acid sequence and second amino acid sequence are contiguous and in a sequential order.

[0952] The location of the variant protein was determined according to results from a number of different software programs and analyses, including analyses from SignalP and other specialized programs. The variant protein is believed to be located as follows with regard to the cell: secreted. The protein localization is believed to be secreted because both signal-peptide prediction programs predict that this protein has a signal peptide, and neither trans-membrane region prediction program predicts that this protein has a trans-membrane region.

[0953] Variant protein HUM4COLA_PEA_{—}1_P14 (SEQ ID NO:277) also has the following non-silent SNPs (Single Nucleotide Polymorphisms) as listed in Table 10, (given according to their position(s) on the amino acid sequence, with the alternative amino acid(s) listed; the last column indicates whether the SNP is known or not; the presence of known SNPs in variant protein HUM4COLA_PEA_{—}1_P14 (SEQ ID NO:277) Sequence provides support for the deduced sequence of this variant protein according to the present invention).

TABLE 10
Amino acid mutations

| SNP position(s) on amino acid | Alternative amino | Previously known |
|---|---|---|
| sequence | acid(s) | SNP? |
| 6 | P -> | No |
| 20 | A -> | No |
| 20 | A -> V | Yes |
| 65 | K -> E | No |
| 82 | E -> G | No |
| 82 | E -> K | Yes |
| 113 | D -> | No |
| 127 | N -> K | Yes |
| 160 | Y -> * | Yes |
| 165 | D -> N | Yes |
| 170 | F -> | No |
| 174 | E -> | No |
| 190 | H -> R | No |
| 205 | D -> G | No |
| 222 | F -> L | No |
| 229 | A -> | No |
| 237 | E -> | No |
| 255 | W -> R | No |

[0954] The glycosylation sites of variant protein HUM4COLA_PEA_{—}1_P14 (SEQ ID NO:277), as compared to the known protein 92 kDa type IV collagenase precursor (SEQ ID NO:275), are described in Table 11 (given according to their position(s) on the amino acid sequence in the first column; the second column indicates whether the glycosylation site is present in the variant protein; and the last column indicates whether the position is different on the variant protein).

TABLE 11
Glycosylation site(s)

| Position(s) on known amino | Present in variant | Position in variant |
|---|---|---|
| acid sequence | protein? | protein? |
| 38 | yes | 38 |
| 127 | yes | 127 |
| 120 | yes | 120 |

[0955] Variant protein HUM4COLA_PEA_{—}1_P14 (SEQ ID NO:277) is encoded by the following transcript(s): HUM4COLA_PEA_{—}1_T1 (SEQ ID NO:245), for which the sequence(s) is/are given at the end of the application. The coding portion of transcript HUM4COLA_PEA_{—}1_T1 (SEQ ID NO:245) is shown in bold; this coding portion starts at position 33 and ends at position 860. The transcript also has the following SNPs as listed in Table 12 (given according to their position on the nucleotide sequence, with the alternative nucleic acid listed; the last column indicates whether the SNP is known or not; the presence of known SNPs in variant protein HUM4COLA_PEA_{—}1_P14 (SEQ ID NO:277) Sequence provides support for the deduced sequence of this variant protein according to the present invention).

TABLE 12
Nucleic acid SNPs

| SNP position on nucleotide | Alternative nucleic | Previously known |
|---|---|---|
| sequence | acid | SNP? |
| 48 | C -> | No |
| 91 | C -> | No |
| 91 | C -> T | Yes |
| 225 | A -> G | No |
| 276 | G -> A | Yes |
| 277 | A -> G | No |
| 371 | C -> | No |
| 413 | C -> G | Yes |
| 503 | T -> C | No |
| 512 | C -> G | Yes |
| 525 | G -> A | Yes |
| 540 | T -> | No |
| 554 | G -> | No |
| 601 | A -> G | No |
| 646 | A -> G | No |
| 698 | T -> G | No |
| 713 | -> A | No |
| 713 | -> T | No |
| 719 | C -> | No |
| 743 | G -> | No |
| 795 | T -> C | No |
| 951 | -> A | No |
| 1125 | G -> A | Yes |
| 1175 | G -> | No |
| 1205 | G -> | No |
| 1227 | G -> | No |
| 1539 | C -> | No |
| 1629 | C -> T | Yes |
| 1635 | C -> T | Yes |
| 1926 | G -> | No |
| 2010 | C -> G | Yes |
| 2044 | C -> A | No |
| 2083 | G -> A | No |
| 2110 | A -> C | Yes |
| 2125 | G -> A | Yes |
| 2151 | G -> A | Yes |
| 2233 | C -> A | No |
| 2234 | G -> A | No |
| 2292 | G -> A | Yes |
| 2311 | C -> T | Yes |
| 2371 | G -> A | Yes |
| 2416 | C -> T | Yes |
| 2431 | G -> | No |
| 2452 | A -> C | Yes |
| 2469 | G -> A | Yes |
| 2509 | C -> T | Yes |
| 2559 | T -> C | Yes |
| 2603 | T -> | No |
| 2603 | T -> C | No |
| 2604 | T -> A | No |
| 2604 | T -> C | No |

[0956] Variant protein HUM4COLA_PEA_{—}1_P15 (SEQ ID NO:278) according to the present invention has an amino acid sequence as given at the end of the application; it is encoded by transcript(s) HUM4COLA_PEA_{—}1_T5 (SEQ ID NO:246). An alignment is given to the known protein (92 kDa type IV collagenase precursor (SEQ ID NO:275)) at the end of the application. One or more alignments to one or more previously published protein sequences are given at the end of the application. A brief description of the relationship of the variant protein according to the present invention to each such aligned protein is as follows:

[0957] Comparison report between HUM4COLA_PEA_{—}1_P15 (SEQ ID NO:278) and MM09_HUMAN:

[0958] 1. An isolated chimeric polypeptide encoding for HUM4COLA_PEA_{—}1_P15 (SEQ ID NO:278), comprising a first amino acid sequence being at least 90% homologous to MSLWQPLVLVLLVLGCCFAAPRQRQSTLVLFPGDLRTNLTDRQLAEEYLYRYGYTRVA EMRGESKSLGPALLLLQKQLSLPETGELDSATLKAMRTPRCGVPDLGRFQTFEGDLKW HHHNITYWIQNYSEDLPRAVIDDAFARAFALWSAVTPLTFTRVYSRDADIVIQFGVAEH GDGYPFDGKDGLLAHAFPPGPGIQGDAHFDDDELWSLGKGV corresponding to amino acids 1-216 of MM09_HUMAN (SEQ ID NO:275), which also corresponds to amino acids 1-216 of HUM4COLA_PEA_{—}1_P15 (SEQ ID NO:278), and a second amino acid sequence being at least 70%, optionally at least 80%, preferably at least 85%, more preferably at least 90% and most preferably at least 95% homologous to a polypeptide having the sequence GEILSPPGP (SEQ ID NO:482) corresponding to amino acids 217-225 of HUM4COLA_PEA_{—}1_P15 (SEQ ID NO:278), wherein said first amino acid sequence and second amino acid sequence are contiguous and in a sequential order.

[0959] 2. An isolated polypeptide encoding for a tail of HUM4COLA_PEA_{—}1_P15 (SEQ ID NO:278), comprising a polypeptide being at least 70%, optionally at least about 80%, preferably at least about 85%, more preferably at least about 90% and most preferably at least about 95% homologous to the sequence GEILSPPGP (SEQ ID NO:482) in HUM4COLA_PEA_{—}1_P15 (SEQ ID NO:278).

[0960] The location of the variant protein was determined according to results from a number of different software programs and analyses, including analyses from SignalP and other specialized programs. The variant protein is believed to be located as follows with regard to the cell: secreted. The protein localization is believed to be secreted because both signal-peptide prediction programs predict that this protein has a signal peptide, and neither trans-membrane region prediction program predicts that this protein has a trans-membrane region.

[0961] Variant protein HUM4COLA_PEA_{—}1_P15 (SEQ ID NO:278) also has the following non-silent SNPs (Single Nucleotide Polymorphisms) as listed in Table 13, (given according to their position(s) on the amino acid sequence, with the alternative amino acid(s) listed; the last column indicates whether the SNP is known or not; the presence of known SNPs in variant protein HUM4COLA_PEA_{—}1_P15 (SEQ ID NO:278) Sequence provides support for the deduced sequence of this variant protein according to the present invention).

TABLE 13
Amino acid mutations

| SNP position(s) on | Alternative amino | Previously |
|---|---|---|
| amino acid sequence | acid(s) | known SNP? |
| 6 | P -> | No |
| 20 | A -> | No |
| 20 | A -> V | Yes |
| 65 | K -> E | No |
| 82 | E -> G | No |
| 82 | E -> K | Yes |
| 113 | D -> | No |
| 127 | N -> K | Yes |
| 160 | Y -> * | Yes |
| 165 | D -> N | Yes |
| 170 | F -> | No |
| 174 | E -> | No |
| 190 | H -> R | No |
| 205 | D -> G | No |
| 218 | E -> * | Yes |

[0962] The glycosylation sites of variant protein HUM4COLA_PEA_{—}1_P15 (SEQ ID NO:278), as compared to the known protein 92 kDa type IV collagenase precursor (SEQ ID NO:275), are described in Table 14 (given according to their position(s) on the amino acid sequence in the first column; the second column indicates whether the glycosylation site is present in the variant protein; and the last column indicates whether the position is different on the variant protein).

TABLE 14
Glycosylation site(s)

| Position(s) on known | Present in | Position in |
|---|---|---|
| amino acid sequence | variant protein? | variant protein? |
| 38 | yes | 38 |
| 127 | yes | 127 |
| 120 | yes | 120 |

[0963] Variant protein HUM4COLA_PEA_{—}1_P15 (SEQ ID NO:278) is encoded by the following transcript(s): HUM4COLA_PEA_{—}1_T5 (SEQ ID NO:246), for which the sequence(s) is/are given at the end of the application. The coding portion of transcript HUM4COLA_PEA_{—}1_T5 (SEQ ID NO:246) is shown in bold; this coding portion starts at position 33 and ends at position 707. The transcript also has the following SNPs as listed in Table 15 (given according to their position on the nucleotide sequence, with the alternative nucleic acid listed; the last column indicates whether the SNP is known or not; the presence of known SNPs in variant protein HUM4COLA_PEA_{—}1_P15 (SEQ ID NO:278) Sequence provides support for the deduced sequence of this variant protein according to the present invention).

TABLE 15
Nucleic acid SNPs

| SNP position on | Alternative | Previously |
|---|---|---|
| nucleotide sequence | nucleic acid | known SNP? |
| 48 | C -> | No |
| 91 | C -> | No |
| 91 | C -> T | Yes |
| 225 | A -> G | No |
| 276 | G -> A | Yes |
| 277 | A -> G | No |
| 371 | C -> | No |
| 413 | C -> G | Yes |
| 503 | T -> C | No |
| 512 | C -> G | Yes |
| 525 | G -> A | Yes |
| 540 | T -> | No |
| 554 | G -> | No |
| 601 | A -> G | No |
| 646 | A -> G | No |
| 684 | G -> T | Yes |
| 790 | T -> G | No |
| 805 | -> A | No |
| 805 | -> T | No |
| 811 | C -> | No |
| 835 | G -> | No |
| 887 | T -> C | No |
| 960 | G -> A | Yes |
| 1010 | G -> | No |
| 1040 | G -> | No |
| 1062 | G -> | No |
| 1374 | C -> | No |
| 1464 | C -> T | Yes |
| 1470 | C -> T | Yes |
| 1761 | G -> | No |
| 1845 | C -> G | Yes |
| 1879 | C -> A | No |
| 1918 | G -> A | No |
| 1945 | A -> C | Yes |
| 1960 | G -> A | Yes |
| 1986 | G -> A | Yes |
| 2068 | C -> A | No |
| 2069 | G -> A | No |
| 2127 | G -> A | Yes |
| 2146 | C -> T | Yes |
| 2206 | G -> A | Yes |
| 2251 | C -> T | Yes |
| 2266 | G -> | No |
| 2287 | A -> C | Yes |
| 2304 | G -> A | Yes |
| 2344 | C -> T | Yes |
| 2394 | T -> C | Yes |
| 2438 | T -> | No |
| 2438 | T -> C | No |
| 2439 | T -> A | No |
| 2439 | T -> C | No |

[0964] As noted above, cluster HUM4COLA features 27 segment(s), which were listed in Table 2 above and for which the sequence(s) are given at the end of the application. These segment(s) are portions of nucleic acid sequence(s) which are described herein separately because they are of particular interest. A description of each segment according to the present invention is now provided.

[0965] Segment cluster HUM4COLA_PEA_{—}1_node_{—}0 (SEQ ID NO:248) according to the present invention is supported by 53 libraries. The number of libraries was determined as previously described. This segment can be found in the following transcript(s): HUM4COLA_PEA_{—}1_T1 (SEQ ID NO:245), HUM4COLA_PEA_{—}1_T5 (SEQ ID NO:246) and HUM4COLA_PEA_{—}1_T6 (SEQ ID NO:247). Table 16 below describes the starting and ending position of this segment on each transcript.

TABLE 16
Segment location on transcripts

| | Segment | Segment |
|---|---|---|
| Transcript name | starting position | ending position |
| HUM4COLA_PEA_1_T1 (SEQ ID | 1 | 170 |
| NO: 245) | | |
| HUM4COLA_PEA_1_T5 (SEQ ID | 1 | 170 |
| NO: 246) | | |
| HUM4COLA_PEA_1_T6 (SEQ ID | 1 | 170 |
| NO: 247) | | |

[0966] Segment cluster HUM4COLA_PEA_{—}1_node_{—}0 (SEQ ID NO:249) according to the present invention is supported by 60 libraries. The number of libraries was determined as previously described. This segment can be found in the following transcript(s): HUM4COLA_PEA_{—}1_T1 (SEQ ID NO:245), HUM4COLA_PEA_{—}1_T5 (SEQ ID NO:246) and HUM4COLA_PEA_{—}1_T6 (SEQ ID NO:247). Table 17 below describes the starting and ending position of this segment on each transcript.

TABLE 17
Segment location on transcripts

| | Segment | Segment |
|---|---|---|
| Transcript name | starting position | ending position |
| HUM4COLA_PEA_1_T1 (SEQ ID | 171 | 403 |
| NO: 245) | | |
| HUM4COLA_PEA_1_T5 (SEQ ID | 171 | 403 |
| NO: 246) | | |
| HUM4COLA_PEA_1_T6 (SEQ ID | 171 | 403 |
| NO: 247) | | |

[0967] Segment cluster HUM4COLA_PEA_{—}1_node_{—}4 (SEQ ID NO:250) according to the present invention is supported by 51 libraries. The number of libraries was determined as previously described. This segment can be found in the following transcript(s): HUM4COLA_PEA_{—}1_T1 (SEQ ID NO:245), HUM4COLA_PEA_{—}1_T5 (SEQ ID NO:246) and HUM4COLA-PEA_{—}1_T6 (SEQ ID NO:247). Table 18 below describes the starting and ending position of this segment on each transcript.

TABLE 18
Segment location on transcripts

| | Segment | Segment |
|---|---|---|
| Transcript name | starting position | ending position |
| HUM4COLA_PEA_1_T1 (SEQ ID | 404 | 552 |
| NO: 245) | | |
| HUM4COLA_PEA_1_T5 (SEQ ID | 404 | 552 |
| NO: 246) | | |
| HUM4COLA_PEA_1_T6 (SEQ ID | 404 | 552 |
| NO: 247) | | |

[0968] Segment cluster HUM4COLA_PEA_{—}1_node_{—}7 (SEQ ID NO:251) according to the present invention is supported by 64 libraries. The number of libraries was determined as previously described. This segment can be found in the following transcript(s): HUM4COLA_PEA_{—}1_T1 (SEQ ID NO:245), HUM4COLA_PEA_{—}1_T5 (SEQ ID NO:246) and HUM4COLA_PEA_{—}1_T6 (SEQ ID NO:247). Table 19 below describes the starting and ending position of this segment on each transcript.

TABLE 19
Segment location on transcripts

| | Segment | Segment |
|---|---|---|
| Transcript name | starting position | ending position |
| HUM4COLA_PEA_1_T1 (SEQ ID | 553 | 681 |
| NO: 245) | | |
| HUM4COLA_PEA_1_T5 (SEQ ID | 553 | 681 |
| NO: 246) | | |
| HUM4COLA_PEA_1_T6 (SEQ ID | 553 | 681 |
| NO: 247) | | |

[0969] Segment cluster HUM4COLA_PEA_{—}1_node_{—}1 (SEQ ID NO:252) according to the present invention is supported by 2 libraries. The number of libraries was determined as previously described. This segment can be found in the following transcript(s): HUM4COLA_PEA_{—}1_T1 (SEQ ID NO:245). Table 20 below describes the starting and ending position of this segment on each transcript.

TABLE 20
Segment location on transcripts

| | Segment | Segment |
|---|---|---|
| Transcript name | starting position | ending position |
| HUM4COLA_PEA_1_T1 (SEQ ID | 856 | 1112 |
| NO: 245) | | |

[0970] Segment cluster HUM4COLA_PEA_{—}1_node_{—}19 (SEQ ID NO:253) according to the present invention is supported by 81 libraries. The number of libraries was determined as previously described. This segment can be found in the following transcript(s): HUM4COLA_PEA_{—}1_T1 (SEQ ID NO:245) and HUM4COLA_PEA_{—}1_T5 (SEQ ID NO:246). Table 21 below describes the starting and ending position of this segment on each transcript.

TABLE 21
Segment location on transcripts

| | Segment | Segment |
|---|---|---|
| Transcript name | starting position | ending position |
| HUM4COLA_PEA_1_T1 (SEQ ID | 1464 | 1619 |
| NO: 245) | | |
| HUM4COLA_PEA_1_T5 (SEQ ID | 1299 | 1454 |
| NO: 246) | | |

[0971] Segment cluster HUM4COLA_PEA_{—}1_node_{—}40 (SEQ ID NO:254) according to the present invention is supported by 129 libraries. The number of libraries was determined as previously described. This segment can be found in the following transcript(s): HUM4COLA_PEA_{—}1_T1 (SEQ ID NO:245), HUM4COLA_PEA_{—}1_T5 (SEQ ID NO:246) and HUM4COLA_PEA_{—}1_T6 (SEQ ID NO:247). Table 22 below describes the starting and ending position of this segment on each transcript.

TABLE 22
Segment location on transcripts

| | Segment | Segment |
|---|---|---|
| Transcript name | starting position | ending position |
| HUM4COLA_PEA_1_T1 (SEQ ID | 2295 | 2453 |
| NO: 245) | | |
| HUM4COLA_PEA_1_T5 (SEQ ID | 2130 | 2288 |
| NO: 246) | | |
| HUM4COLA_PEA_1_T6 (SEQ ID | 1778 | 1936 |
| NO: 247) | | |

[0972] Segment cluster HUM4COLA_PEA_{—}1_node_{—}41 (SEQ ID NO:255) according to the present invention is supported by 112 libraries. The number of libraries was determined as previously described. This segment can be found in the following transcript(s): HUM4COLA_PEA_{—}1_T1 (SEQ ID NO:245), HUM4COLA_PEA_{—}1_T5 (SEQ ID NO:246) and HUM4COLA_PEA_{—}1_T6 (SEQ ID NO:247). Table 23 below describes the starting and ending position of this segment on each transcript.

TABLE 23
Segment location on transcripts

| | Segment | Segment |
|---|---|---|
| Transcript name | starting position | ending position |
| HUM4COLA_PEA_1_T1 (SEQ ID | 2454 | 2616 |
| NO: 245) | | |
| HUM4COLA_PEA_1_T5 (SEQ ID | 2289 | 2451 |
| NO: 246) | | |
| HUM4COLA_PEA_1_T6 (SEQ ID | 1937 | 2099 |
| NO: 247) | | |

[0973] According to an optional embodiment of the present invention, short segments related to the above cluster are also provided. These segments are up to about 120 bp in length, and so are included in a separate description.

[0974] Segment cluster HUM4COLA_PEA_{—}1_node_{—}8 (SEQ ID NO:256) according to the present invention is supported by 1 libraries. The number of libraries was determined as previously described. This segment can be found in the following transcript(s): HUM4COLA_PEA_{—}1_T5 (SEQ ID NO:246). Table 24 below describes the starting and ending position of this segment on each transcript.

TABLE 24
Segment location on transcripts

| | Segment | Segment |
|---|---|---|
| Transcript name | starting position | ending position |
| HUM4COLA_PEA_1_T5 (SEQ ID | 682 | 773 |
| NO: 246) | | |

[0975] Segment cluster HUM4COLA_PEA_{—}1_node_{—}9 (SEQ ID NO:257) according to the present invention is supported by 59 libraries. The number of libraries was determined as previously described. This segment can be found in the following transcript(s): HUM4COLA_PEA_{—}1_T1 (SEQ ID NO:245), HUM4COLA_PEA_{—}1_T5 (SEQ ID NO:246) and HUM4COLA_PEA_{—}1_T6 (SEQ ID NO:247). Table 25 below describes the starting and ending position of this segment on each transcript.

TABLE 25
Segment location on transcripts

| | Segment | Segment |
|---|---|---|
| Transcript name | starting position | ending position |
| HUM4COLA_PEA_1_T1 (SEQ ID | 682 | 736 |
| NO: 245) | | |
| HUM4COLA_PEA_1_T5 (SEQ ID | 774 | 828 |
| NO: 246) | | |
| HUM4COLA_PEA_1_T6 (SEQ ID | 682 | 736 |
| NO: 247) | | |

[0976] Segment cluster HUM4COLA_PEA_{—}1_node_{—}10 (SEQ ID NO:258) according to the present invention is supported by 63 libraries. The number of libraries was determined as previously described. This segment can be found in the following transcript(s): HUM4COLA_PEA_{—}1_T1 (SEQ ID NO:245), HUM4COLA_PEA_{—}1_T5 (SEQ ID NO:246) and HUM4COLA_PEA_{—}1_T6 (SEQ ID NO:247). Table 26 below describes the starting and ending position of this segment on each transcript.

TABLE 26
Segment location on transcripts

| | Segment | Segment |
|---|---|---|
| Transcript name | starting position | ending position |
| HUM4COLA_PEA_1_T1 (SEQ ID | 737 | 855 |
| NO: 245) | | |
| HUM4COLA_PEA_1_T5 (SEQ ID | 829 | 947 |
| NO: 246) | | |
| HUM4COLA_PEA_1_T6 (SEQ ID | 737 | 855 |
| NO: 247) | | |

[0977] Segment cluster HUM4COLA_PEA_{—}1_node_{—}12 (SEQ ID NO:259) according to the present invention is supported by 60 libraries. The number of libraries was determined as previously described. This segment can be found in the following transcript(s): HUM4COLA_PEA_{—}1_T1 (SEQ ID NO:245), HUM4COLA_PEA_{—}1_T5 (SEQ ID NO:246) and HUM4COLA_PEA_{—}1_T6 (SEQ ID NO:247). Table 27 below describes the starting and ending position of this segment on each transcript.

TABLE 27
Segment location on transcripts

| | Segment | Segment |
|---|---|---|
| Transcript name | starting position | ending position |
| HUM4COLA_PEA_1_T1 (SEQ ID | 1113 | 1167 |
| NO: 245) | | |
| HUM4COLA_PEA_1_T5 (SEQ ID | 948 | 1002 |
| NO: 246) | | |
| HUM4COLA_PEA_1_T6 (SEQ ID | 856 | 910 |
| NO: 247) | | |

[0978] Segment cluster HUM4COLA_PEA_{—}1_node_{—}13 (SEQ ID NO:260) according to the present invention is supported by 67 libraries. The number of libraries was determined as previously described. This segment can be found in the following transcript(s): HUM4COLA_PEA_{—}1_T1 (SEQ ID NO:245), HUM4COLA_PEA_{—}1_T5 (SEQ ID NO:246) and HUM4COLA_PEA_{—}1_T6 (SEQ ID NO:247). Table 28 below describes the starting and ending position of this segment on each transcript.

TABLE 28
Segment location on transcripts

| | Segment | Segment |
|---|---|---|
| Transcript name | starting position | ending position |
| HUM4COLA_PEA_1_T1 (SEQ ID | 1168 | 1286 |
| NO: 245) | | |
| HUM4COLA_PEA_1_T5 (SEQ ID | 1003 | 1121 |
| NO: 246) | | |
| HUM4COLA_PEA_1_T6 (SEQ ID | 911 | 1029 |
| NO: 247) | | |

[0979] Segment cluster HUM4COLA_PEA_{—}1_node_{—}16 (SEQ ID NO:261) according to the present invention is supported by 73 libraries. The number of libraries was determined as previously described. This segment can be found in the following transcript(s): HUM4COLA_PEA_{—}1_T1 (SEQ ID NO:245), HUM4COLA_PEA_{—}1_T5 (SEQ ID NO:246) and HUM4COLA_PEA_{—}1_T6 (SEQ ID NO:247). Table 29 below describes the starting and ending position of this segment on each transcript.

TABLE 29
Segment location on transcripts

| | Segment | Segment |
|---|---|---|
| Transcript name | starting position | ending position |
| HUM4COLA_PEA_1_T1 (SEQ ID | 1287 | 1359 |
| NO: 245) | | |
| HUM4COLA_PEA_1_T5 (SEQ ID | 1122 | 1194 |
| NO: 246) | | |
| HUM4COLA_PEA_1_T6 (SEQ ID | 1030 | 1102 |
| NO: 247) | | |

[0980] Segment cluster HUM4COLA_PEA_{—}1_node_{—}17 (SEQ ID NO:262) according to the present invention is supported by 79 libraries. The number of libraries was determined as previously described. This segment can be found in the following transcript(s): HUM4COLA_PEA_{—}1_T1 (SEQ ID NO:245) and HUM4COLA_PEA_{—}1_T5 (SEQ ID NO:246). Table 30 below describes the starting and ending position of this segment on each transcript.

TABLE 30
Segment location on transcripts

| | Segment | Segment |
|---|---|---|
| Transcript name | starting position | ending position |
| HUM4COLA_PEA_1_T1 (SEQ ID | 1360 | 1463 |
| NO: 245) | | |
| HUM4COLA_PEA_1_T5 (SEQ ID | 1195 | 1298 |
| NO: 246) | | |

[0981] Segment cluster HUM4COLA_PEA_{—}1_node_{—}22 (SEQ ID NO:263) according to the present invention is supported by 66 libraries. The number of libraries was determined as previously described. This segment can be found in the following transcript(s): HUM4COLA_PEA_{—}1_T1 (SEQ ID NO:245), HUM4COLA_PEA_{—}1_T5 (SEQ ID NO:246) and HUM4COLA_PEA_{—}1_T6 (SEQ ID NO:247). Table 31 below describes the starting and ending position of this segment on each transcript.

TABLE 31
Segment location on transcripts

| | Segment | Segment |
|---|---|---|
| Transcript name | starting position | ending position |
| HUM4COLA_PEA_1_T1 (SEQ ID | 1620 | 1663 |
| NO: 245) | | |
| HUM4COLA_PEA_1_T5 (SEQ ID | 1455 | 1498 |
| NO: 246) | | |
| HUM4COLA_PEA_1_T6 (SEQ ID | 1103 | 1146 |
| NO: 247) | | |

[0982] Segment cluster HUM4COLA_PEA_{—}1_node-23 (SEQ ID NO:264) according to the present invention can be found in the following transcript(s): HUM4COLA_PEA_{—}1_T1 (SEQ ID NO:245), HUM4COLA_PEA_{—}1_T5 (SEQ ID NO:246) and HUM4COLA-PEA_{—}1_T6 (SEQ ID NO:247). Table 32 below describes the starting and ending position of this segment on each transcript.

TABLE 32
Segment location on transcripts

| | Segment | Segment |
|---|---|---|
| Transcript name | starting position | ending position |
| HUM4COLA_PEA_1_T1 (SEQ ID | 1664 | 1682 |
| NO: 245) | | |
| HUM4COLA_PEA_1_T5 (SEQ ID | 1499 | 1517 |
| NO: 246) | | |
| HUM4COLA_PEA_1_T6 (SEQ ID | 1147 | 1165 |
| NO: 247) | | |

[0983] Segment cluster HUM4COLA_PEA_{—}1_node_{—}24 (SEQ ID NO:265) according to the present invention is supported by 52 libraries. The number of libraries was determined as previously described. This segment can be found in the following transcript(s): HUM4COLA_PEA_{—}1_T1 (SEQ ID NO:245), HUM4COLA_PEA_{—}1_T5 (SEQ ID NO:246) and HUM4COLA_PEA_{—}1_T6 (SEQ ID NO:247). Table 33 below describes the starting and ending position of this segment on each transcript.

TABLE 33
Segment location on transcripts

| | Segment | Segment |
|---|---|---|
| Transcript name | starting position | ending position |
| HUM4COLA_PEA_1_T1 (SEQ ID | 1683 | 1780 |
| NO: 245) | | |
| HUM4COLA_PEA_1_T5 (SEQ ID | 1518 | 1615 |
| NO: 246) | | |
| HUM4COLA_PEA_1_T6 (SEQ ID | 1166 | 1263 |
| NO: 247) | | |

[0984] Segment cluster HUM4COLA_PEA_{—}1_node_{—}25 (SEQ ID NO:266) according to the present invention is supported by 46 libraries. The number of libraries was determined as previously described. This segment can be found in the following transcript(s): HUM4COLA_PEA_{—}1_T1 (SEQ ID NO:245), HUM4COLA_PEA_{—}1_T5 (SEQ ID NO:246) and HUM4COLA_PEA_{—}1_T6 (SEQ ID NO:247). Table 34 below describes the starting and ending position of this segment on each transcript.

TABLE 34
Segment location on transcripts

| | Segment | Segment |
|---|---|---|
| Transcript name | starting position | ending position |
| HUM4COLA_PEA_1_T1 (SEQ ID | 1781 | 1833 |
| NO: 245) | | |
| HUM4COLA_PEA_1_T5 (SEQ ID | 1616 | 1668 |
| NO: 246) | | |
| HUM4COLA_PEA_1_T6 (SEQ ID | 1264 | 1316 |
| NO: 247) | | |

[0985] Segment cluster HUM4COLA_PEA_{—}1_node_{—}26 (SEQ ID NO:267) according to the present invention is supported by 55 libraries. The number of libraries was determined as previously described. This segment can be found in the following transcript(s): HUM4COLA_PEA_{—}1_T1 (SEQ ID NO:245), HUM4COLA_PEA_{—}1_T5 (SEQ ID NO:246) and HUM4COLA_PEA_{—}1_T6 (SEQ ID NO:247). Table 35 below describes the starting and ending position of this segment on each transcript.

TABLE 35
Segment location on transcripts

| | Segment | Segment |
|---|---|---|
| Transcript name | starting position | ending position |
| HUM4COLA_PEA_1_T1 (SEQ ID | 1834 | 1893 |
| NO: 245) | | |
| HUM4COLA_PEA_1_T5 (SEQ ID | 1669 | 1728 |
| NO: 246) | | |
| HUM4COLA_PEA_1_T6 (SEQ ID | 1317 | 1376 |
| NO: 247) | | |

[0986] Segment cluster HUM4COLA_PEA_{—}1_node_{—}27 (SEQ ID NO:268) according to the present invention can be found in the following transcript(s): HUM4COLA_PEA_{—}1_T1 (SEQ ID NO:245), HUM4COLA_PEA_{—}1_T5 (SEQ ID NO:246) and HUM4COLA_PEA_{—}1_T6 (SEQ ID NO:247). Table 36 below describes the starting and ending position of this segment on each transcript.

TABLE 36
Segment location on transcripts

| | Segment | Segment |
|---|---|---|
| Transcript name | starting position | ending position |
| HUM4COLA_PEA_1_T1 (SEQ ID | 1894 | 1899 |
| NO: 245) | | |
| HUM4COLA_PEA_1_T5 (SEQ ID | 1729 | 1734 |
| NO: 246) | | |
| HUM4COLA_PEA_1_T6 (SEQ ID | 1377 | 1382 |
| NO: 247) | | |

[0987] Segment cluster HUM4COLA-PEA_{—}1_node_{—}29 (SEQ ID NO:269) according to the present invention is supported by 86 libraries. The number of libraries was determined as previously described. This segment can be found in the following transcript(s): HUM4COLA-PEA_{—}1_T1 (SEQ ID NO:245), HUM4COLA PEA_{—}1_T5 (SEQ ID NO:246) and HUM4COLA_PEA_{—}1_T6 (SEQ ID NO:247). Table 37 below describes the starting and ending position of this segment on each transcript.

TABLE 37
Segment location on transcripts

| | Segment | Segment |
|---|---|---|
| Transcript name | starting position | ending position |
| HUM4COLA_PEA_1_T1 (SEQ ID | 1900 | 2008 |
| NO: 245) | | |
| HUM4COLA_PEA_1_T5 (SEQ ID | 1735 | 1843 |
| NO: 246) | | |
| HUM4COLA_PEA_1_T6 (SEQ ID | 1383 | 1491 |
| NO: 247) | | |

[0988] Segment cluster HUM4COLA_PEA_{—}1_node_{—}30 (SEQ ID NO:270) according to the present invention is supported by 83 libraries. The number of libraries was determined as previously described. This segment can be found in the following transcript(s): HUM4COLA_PEA_{—}1_T1 (SEQ ID NO:245), HUM4COLA_PEA_{—}1_T5 (SEQ ID NO:246) and HUM4COLA_PEA_{—}1_T6 (SEQ ID NO:247). Table 38 below describes the starting and ending position of this segment on each transcript.

TABLE 38
Segment location on transcripts

| | Segment | Segment |
|---|---|---|
| Transcript name | starting position | ending position |
| HUM4COLA_PEA_1_T1 (SEQ ID | 2009 | 2039 |
| NO: 245) | | |
| HUM4COLA_PEA_1_T5 (SEQ ID | 1844 | 1874 |
| NO: 246) | | |
| HUM4COLA_PEA_1_T6 (SEQ ID | 1492 | 1522 |
| NO: 247) | | |

[0989] Segment cluster HUM4COLA_PEA_{—}1_node_{—}32 (SEQ ID NO:271) according to the present invention is supported by 103 libraries. The number of libraries was determined as previously described. This segment can be found in the following transcript(s): HUM4COLA_PEA_{—}1_T1 (SEQ ID NO:245), HUM4COLA_PEA_{—}1_T5 (SEQ ID NO:246) and HUM4COLA_PEA_{—}1_T6 (SEQ ID NO:247). Table 39 below describes the starting and ending position of this segment on each transcript.

TABLE 39
Segment location on transcripts

| | Segment | Segment |
|---|---|---|
| Transcript name | starting position | ending position |
| HUM4COLA_PEA_1_T1 (SEQ ID | 2040 | 2158 |
| NO: 245) | | |
| HUM4COLA_PEA_1_T5 (SEQ ID | 1875 | 1993 |
| NO: 246) | | |
| HUM4COLA_PEA_1_T6 (SEQ ID | 1523 | 1641 |
| NO: 247) | | |

[0990] Segment cluster HUM4COLA_PEA_{—}1_node_{—}33 (SEQ ID NO:272) according to the present invention is supported by 101 libraries. The number of libraries was determined as previously described. This segment can be found in the following transcript(s): HUM4COLA_PEA_{—}1_T1 (SEQ ID NO:245), HUM4COLA_PEA_{—}1_T5 (SEQ ID NO:246) and HUM4COLA_PEA_{—}1_T6 (SEQ ID NO:247). Table 40 below describes the starting and ending position of this segment on each transcript.

TABLE 40
Segment location on transcripts

| | Segment | Segment |
|---|---|---|
| Transcript name | starting position | ending position |
| HUM4COLA_PEA_1_T1 (SEQ ID | 2159 | 2190 |
| NO: 245) | | |
| HUM4COLA_PEA_1_T5 (SEQ ID | 1994 | 2025 |
| NO: 246) | | |
| HUM4COLA_PEA_1_T6 (SEQ ID | 1642 | 1673 |
| NO: 247) | | |

[0991] Segment cluster HUM4COLA_PEA_{—}1_node_{—}36 (SEQ ID NO:273) according to the present invention is supported by 108 libraries. The number of libraries was determined as previously described. This segment can be found in the following transcript(s): HUM4COLA_PEA_{—}1_T1 (SEQ ID NO:245), HUM4COLA_PEA_{—}1_T5 (SEQ ID NO:246) and HUM4COLA_PEA_{—}1_T6 (SEQ ID NO:247). Table 41 below describes the starting and ending position of this segment on each transcript.

TABLE 41
Segment location on transcripts

| | Segment | Segment |
|---|---|---|
| Transcript name | starting position | ending position |
| HUM4COLA_PEA_1_T1 (SEQ ID | 2191 | 2242 |
| NO: 245) | | |
| HUM4COLA_PEA_1_T5 (SEQ ID | 2026 | 2077 |
| NO: 246) | | |
| HUM4COLA_PEA_1_T6 (SEQ ID | 1674 | 1725 |
| NO: 247) | | |

[0992] Segment cluster HUM4COLA_PEA_{—}1_node_{—}37 (SEQ ID NO:274) according to the present invention is supported by 118 libraries. The number of libraries was determined as previously described. This segment can be found in the following transcript(s): HUM4COLA_PEA_{—}1_T1 (SEQ ID NO:245), HUM4COLA_PEA_{—}1_T5 (SEQ ID NO:246) and HUM4COLA_PEA_{—}1_T6 (SEQ ID NO:247). Table 42 below describes the starting and ending position of this segment on each transcript.

TABLE 42
Segment location on transcripts

| | Segment | Segment |
|---|---|---|
| Transcript name | starting position | ending position |
| HUM4COLA_PEA_1_T1 (SEQ ID | 2243 | 2294 |
| NO: 245) | | |
| HUM4COLA_PEA_1_T5 (SEQ ID | 2078 | 2129 |
| NO: 246) | | |
| HUM4COLA_PEA_1_T6 (SEQ ID | 1726 | 1777 |
| NO: 247) | | |

[0993] Variant protein alignment to the previously known protein:

| Sequence name: MM09_HUMAN (SEQ ID NO:275) | | | |
|---|---|---|---|
| Sequence documentation: | | | |
| Alignment of: HUM4COLA_PEA_1_P7 (SEQ ID NO:276) × | | | |
| MM09_HUMAN (SEQ ID NO:275) . . | | | |
| Alignment segment 1/1: | | | |
| Quality: | 3559.00 | Escore: | 0 |
| Matching length: | 359 | Total length: | 359 |
| Matching Percent | 99.72 | Matching Percent | 99.72 |
| Similarity: | | Identity: | |
| Total Percent | 99.72 | Total Percent | 99.72 |
| Similarity: | | Identity: | |
| Gaps: | 0 | | |

| Alignment: | | |
|---|---|---|
| | . . . . . | |
| 1 | MSLWQPLVLVLLVLGCCFAAPRQRQSTLVLFPGDLRTNLTDRQLAEEYLY | 50 |
| | \|\|\|\|\|\|\|\|\|\|\|\|\|\|\|\|\|\|\|\|\|\|\|\|\|\|\|\|\|\|\|\|\|\|\|\|\|\|\|\|\|\|\|\|\|\|\|\|\|\| | |
| 1 | MSLWQPLVLVLLVLGCCFAAPRQRQSTLVLFPGDLRTNLTDRQLAEEYLY | 50 |
| | . . . . . | |
| 51 | RYGYTRVAEMRGESKSLGPALLLLQKQLSLPETGELDSATLKAMRTPRCG | 100 |
| | \|\|\|\|\|\|\|\|\|\|\|\|\|\|\|\|\|\|\|\|\|\|\|\|\|\|\|\|\|\|\|\|\|\|\|\|\|\|\|\|\|\|\|\|\|\|\|\|\|\| | |
| 51 | RYGYTRVAEMRGESKSLGPALLLLQKQLSLPETGELDSATLKANRTPRCG | 100 |
| | . . . . . | |
| 101 | VPDLGRFQTFEGDLKWHHHNITYWIQNYSEDLPRAVIDDAFARAFALWSA | 150 |
| | \|\|\|\|\|\|\|\|\|\|\|\|\|\|\|\|\|\|\|\|\|\|\|\|\|\|\|\|\|\|\|\|\|\|\|\|\|\|\|\|\|\|\|\|\|\|\|\|\|\| | |
| 101 | VPDLGRFQTFEGDLKWHHHNITYWIQNYSEDLPRAVIDDAFARAFALWSA | 150 |
| | . . . . . | |
| 151 | VTPLTFTRVYSRDADIVIQFGVAEHGDGYPFDGKDGLLAHAFPPGPGIQG | 200 |
| | \|\|\|\|\|\|\|\|\|\|\|\|\|\|\|\|\|\|\|\|\|\|\|\|\|\|\|\|\|\|\|\|\|\|\|\|\|\|\|\|\|\|\|\|\|\|\|\|\|\| | |
| 151 | VTPLTFTRVYSRDADIVIQFGVAEHGDGYPFDGKDGLLAHAFPPGPGIQG | 200 |
| | . . . . . | |
| 201 | DAHFDDDELWSLGKGVVVPTRFGNADGAACHFPFIFEGRSYSACTTDGRS | 250 |
| | \|\|\|\|\|\|\|\|\|\|\|\|\|\|\|\|\|\|\|\|\|\|\|\|\|\|\|\|\|\|\|\|\|\|\|\|\|\|\|\|\|\|\|\|\|\|\|\|\|\| | |
| 201 | DAHFDDDELWSLGKGVVVPTRFGNADGAACHFPFIFEGRSYSACTTDGRS | 250 |
| | . . . . . | |
| 251 | DGLPWCSTTANYDTDDRFGFCPSERLYTRDGNADGKPCQFPFIFQGQSYS | 300 |
| | \|\|\|\|\|\|\|\|\|\|\|\|\|\|\|\|\|\|\|\|\|\|\|\|\|\|\|\|\|\|\|\|\|\|\|\|\|\|\|\|\|\|\|\|\|\|\|\|\|\| | |
| 251 | DGLPWCSTTANYDTDDRFGFCPSERLYTRDGNADGKPCQFPFIFQGQSYS | 300 |
| | . . . . . | |
| 301 | ACTTDGRSDGYRWCATTANYDRDKLFGFCPTRADSTVMGGNSAGELCVFP | 350 |
| | \|\|\|\|\|\|\|\|\|\|\|\|\|\|\|\|\|\|\|\|\|\|\|\|\|\|\|\|\|\|\|\|\|\|\|\|\|\|\|\|\|\|\|\|\|\|\|\|\|\| | |
| 301 | ACTTDGRSDGYRWCATTANYDRDKLFGFCPTRADSTVMGGNSAGELCVFP | 350 |
| 351 | FTFLGKESS | 359 |
| | \|\|\|\|\|\|\|\|\| | |
| 351 | FTFLGKEYS | 359 |

| Sequence name: MM09_HUMAN (SEQ ID NO:275) | | | |
|---|---|---|---|
| Sequence documentation: | | | |
| Alignment of: HUM4COLA_PEA_1_P14 (SEQ ID NO:277) × | | | |
| MM09_HUMAN (SEQ ID NO:275) . . | | | |
| Alignment segment 1/1: | | | |
| Quality: | 2715.00 | Escore: | 0 |
| Matching length: | 274 | Total length: | 274 |
| Matching Percent | 100.00 | Matching Percent | 100.00 |
| Similarity: | | Identity: | |
| Total Percent | 100.00 | Total Percent | 100.00 |
| Similarity: | | Identity: | |
| Gaps: | 0 | | |

| Alignment: | | |
|---|---|---|
| | . . . . . | |
| 1 | MSLWQPLVLVLLVLGCCFAAPRQRQSTLVLFPGDLRTNLTDRQLAEEYLY | 50 |
| | \|\|\|\|\|\|\|\|\|\|\|\|\|\|\|\|\|\|\|\|\|\|\|\|\|\|\|\|\|\|\|\|\|\|\|\|\|\|\|\|\|\|\|\|\|\|\|\|\|\| | |
| 1 | MSLWQPLVLVLLVLGCCFAAPRQRQSTLVLFPGDLRTNLTDRQLAEEYLY | 50 |
| | . . . . . | |
| 51 | RYGYTRVAEMRGESKSLGPALLLLQKQLSLPETGELDSATLKANRTPRCG | 100 |
| | \|\|\|\|\|\|\|\|\|\|\|\|\|\|\|\|\|\|\|\|\|\|\|\|\|\|\|\|\|\|\|\|\|\|\|\|\|\|\|\|\|\|\|\|\|\|\|\|\|\| | |
| 51 | RYGYTRVAEMRGESKSLGPALLLLQKQLSLPETGELDSATLKANRTPRCG | 100 |
| | . . . . . | |
| 101 | VPDLGRFQTFEGDLKWHHHNITYWIQNYSEDLPRAVIDDAFARAFALWSA | 150 |
| | \|\|\|\|\|\|\|\|\|\|\|\|\|\|\|\|\|\|\|\|\|\|\|\|\|\|\|\|\|\|\|\|\|\|\|\|\|\|\|\|\|\|\|\|\|\|\|\|\|\| | |
| 101 | VPDLGRFQTFEGDLKWHHHNITYWIQNYSEDLPRAVIDDAFARAFALWSA | 150 |
| | . . . . . | |
| 151 | VTPLTFTRVYSRDADIVIQFGVAEHGDGYPFDGKDGLLAHAFPPGPGIQG | 200 |
| | \|\|\|\|\|\|\|\|\|\|\|\|\|\|\|\|\|\|\|\|\|\|\|\|\|\|\|\|\|\|\|\|\|\|\|\|\|\|\|\|\|\|\|\|\|\|\|\|\|\| | |
| 151 | VTPLTFTRVYSRDADIVIQFGVAEHGDGYPFDGKDGLLAHAFPPGPGIQG | 200 |
| | . . . . . | |
| 201 | DAHFDDDELWSLGKGVVVPTRFGNADGAACHFPFIFEGRSYSACTTDGRS | 250 |
| | \|\|\|\|\|\|\|\|\|\|\|\|\|\|\|\|\|\|\|\|\|\|\|\|\|\|\|\|\|\|\|\|\|\|\|\|\|\|\|\|\|\|\|\|\|\|\|\|\|\| | |
| 201 | DAHFDDDELWSLGKGVVVPTRFGNADGAACHFPFIFEGRSYSACTTDGRS | 250 |
| | . . | |
| 251 | DGLPWCSTTANYDTDDRFGFCPSE | 274 |
| | \|\|\|\|\|\|\|\|\|\|\|\|\|\|\|\|\|\|\|\|\|\|\|\| | |
| 251 | DGLPWCSTTANYDTDDRFGFCPSE | 274 |

| Sequence name: MM09_HUMAN (SEQ ID NO:275) | | | |
|---|---|---|---|
| Sequence documentation: | | | |
| Alignment of: HUM4COLA_PEA_1_P15 (SEQ ID NO:278) × | | | |
| MM09_HUMAN (SEQ ID NO:275) . . | | | |
| Alignment segment 1/1: | | | |
| Quality: | 2124.00 | Escore: | 0 |
| Matching length: | 216 | Total length: | 216 |
| Matching Percent | 100.00 | Matching Percent | 100.00 |
| Similarity: | | Identity: | |
| Total Percent | 100.00 | Total Percent | 100.00 |
| Similarity: | | Identity: | |
| Gaps: | 0 | | |

| Alignment: | | |
|---|---|---|
| | . . . . . | |
| 1 | MSLWQPLVLVLLVLGCCFAAPRQRQSTLVLFPGDLRTNLTDRQLAEEYLY | 50 |
| | \|\|\|\|\|\|\|\|\|\|\|\|\|\|\|\|\|\|\|\|\|\|\|\|\|\|\|\|\|\|\|\|\|\|\|\|\|\|\|\|\|\|\|\|\|\|\|\|\|\| | |
| 1 | MSLWQPLVLVLLVLGCCFAAPRQRQSTLVLFPGDLRTNLTDRQLAEEYLY | 50 |
| | . . . . . | |
| 51 | RYGYTRVAEMRGESKSLGPALLLLQKQLSLPETGELDSATLKAMRTPRCG | 100 |
| | \|\|\|\|\|\|\|\|\|\|\|\|\|\|\|\|\|\|\|\|\|\|\|\|\|\|\|\|\|\|\|\|\|\|\|\|\|\|\|\|\|\|\|\|\|\|\|\|\|\| | |
| 51 | RYGYTRVAEMRGESKSLGPALLLLQKQLSLPETGELDSATLKAMRTPRCG | 100 |
| | . . . . . | |
| 101 | VPDLGRFQTFEGDLKWHHHNITYWIQNYSEDLPRAVIDDAFARAFALWSA | 150 |
| | \|\|\|\|\|\|\|\|\|\|\|\|\|\|\|\|\|\|\|\|\|\|\|\|\|\|\|\|\|\|\|\|\|\|\|\|\|\|\|\|\|\|\|\|\|\|\|\|\|\| | |
| 101 | VPDLGRFQTFEGDLKWHHHNITYWIQNYSEDLPRAVIDDAFARAFALWSA | 150 |
| | . . . . . | |
| 151 | VTPLTFTRVYSRDADIVIQFGVAEHGDGYPFDGKDGLLAHAFPPGPGIQG | 200 |
| | \|\|\|\|\|\|\|\|\|\|\|\|\|\|\|\|\|\|\|\|\|\|\|\|\|\|\|\|\|\|\|\|\|\|\|\|\|\|\|\|\|\|\|\|\|\|\|\|\|\| | |
| 151 | VTPLTFTRVYSRDADIVIQFGVAEHGDGYPFDGKDGLLAHAFPPGPGIQG | 200 |
| | . | |
| 201 | DAHFDDDELWSLGKGV | 216 |
| | \|\|\|\|\|\|\|\|\|\|\|\|\|\|\|\| | |
| 201 | DAHFDDDELWSLGKGV | 216 |

### Description for Cluster HUMICAMA1A

[0994] Cluster HUMICAMA1A features 6 transcript(s) and 22 segment(s) of interest, the names for which are given in Tables 1 and 2, respectively, the sequences themselves are given at the end of the application. The selected protein variants are given in table 3.

TABLE 1
Transcripts of interest

| Transcript Name | Sequence ID No. |
|---|---|
| HUMICAMA1A_PEA_1_T2 | 279 |
| HUMICAMA1A_PEA_1_T4 | 280 |
| HUMICAMA1A_PEA_1_T5 | 281 |
| HUMICAMA1A_PEA_1_T8 | 282 |
| HUMICAMA1A_PEA_1_T12 | 283 |
| HUMICAMA1A_PEA_1_T16 | 284 |

[0995] TABLE 2
Segments of interest

| Segment Name | Sequence ID No. |
|---|---|
| HUMICAMA1A_PEA_1_node_0 | 285 |
| HUMICAMA1A_PEA_1_node_3 | 286 |
| HUMICAMA1A_PEA_1_node_12 | 287 |
| HUMICAMA1A_PEA_1_node_13 | 288 |
| HUMICAMA1A_PEA_1_node_14 | 289 |
| HUMICAMA1A_PEA_1_node_20 | 290 |
| HUMICAMA1A_PEA_1_node_21 | 291 |
| HUMICAMA1A_PEA_1_node_24 | 292 |
| HUMICAMA1A_PEA_1_node_25 | 293 |
| HUMICAMA1A_PEA_1_node_27 | 294 |
| HUMICAMA1A_PEA_1_node_29 | 295 |
| HUMICAMA1A_PEA_1_node_2 | 296 |
| HUMICAMA1A_PEA_1_node_4 | 297 |
| HUMICAMA1A_PEA_1_node_15 | 298 |
| HUMICAMA1A_PEA_1_node_16 | 299 |
| HUMICAMA1A_PEA_1_node_17 | 300 |
| HUMICAMA1A_PEA_1_node_18 | 301 |
| HUMICAMA1A_PEA_1_node_19 | 302 |
| HUMICAMA1A_PEA_1_node_22 | 303 |
| HUMICAMA1A_PEA_1_node_23 | 304 |
| HUMICAMA1A_PEA_1_node_26 | 305 |
| HUMICAMA1A_PEA_1_node_28 | 306 |

[0996] TABLE 3
Proteins of interest

| Protein Name | Sequence ID No. | Corresponding Transcript(s) |
|---|---|---|
| HUMICAMA1A_PEA_1_P2 | 309 | HUMICAMA1A_PEA_1_T2 (SEQ |
| | | ID NO: 279) |
| HUMICAMA1A_PEA_1_P5 | 310 | HUMICAMA1A_PEA_1_T5 |
| | | (SEQ ID NO: 281); |
| | | HUMICAMA1A_PEA_1_T12 |
| | | (SEQ ID NO: 283); |
| | | HUMICAMA1A_PEA_1_T16 |
| | | (SEQ ID NO: 284) |
| HUMICAMA1A_PEA_1_P8 | 311 | HUMICAMA1A_PEA_1_T8 |
| | | (SEQ ID NO: 282) |
| HUMICAMA1A_PEA_1_P15 | 312 | HUMICAMA1A_PEA_1_T4 |
| | | (SEQ ID NO: 280) |

[0997] These sequences are variants of the known protein Intercellular adhesion molecule-1 precursor (SEQ ID NO:307) (SwissProt accession identifier ICA1_HUMAN; known also according to the synonyms ICAM-1; Major group rhinovirus receptor; CD54 antigen), referred to herein as the previously known protein.

[0998] Protein Intercellular adhesion molecule-1 precursor (SEQ ID NO:307) is known or believed to have the following function(s): ICAM proteins are ligands for the leukocyte adhesion LFA-1 protein (Integrin alpha-L/beta-2). The sequence for protein Intercellular adhesion molecule-1 precursor is given at the end of the application, as “Intercellular adhesion molecule-1 precursor amino acid sequence” (SEQ ID NO:307). Known polymorphisms for this sequence are as shown in Table 4.

TABLE 4
Amino acid mutations or Known Protein

| SNP position(s) | |
|---|---|
| on amino acid | |
| sequence | Comment |
| 56 | K -> M (in Kilifi; dbSNP: 5491). /FTId = VAR_010204. |
| 155 | K -> N (in dbSNP: 5492). /FTId = VAR_014651. |
| 241 | G -> R (in dbSNP: 1799969). /FTId = VAR_014186. |
| 315 | V -> M (in dbSNP: 5495). /FTId = VAR_014652. |
| 352 | P -> L (in dbSNP: 1801714). /FTId = VAR_014653. |
| 397 | R -> Q (in dbSNP: 5497). /FTId = VAR_014654. |
| 469 | E -> K (in dbSNP: 5498). /FTId = VAR_014187. |
| 478 | R -> W. /FTId = VAR_016267. |
| 9-10 | AL -> PV |

[0999] Protein Intercellular adhesion molecule-1 precursor (SEQ ID NO:307) localization is believed to be Type I membrane protein.

[1000] A lower serum concentration of soluble ICAM-1 is seen in women with stage III and IV endometriosis (Barrier et al, J Soc Gynecol Investig. 2002 March-April; 9(2):98-101). Variants of this cluster are suitable as diagnostic markers for endometriosis.

[1001] The previously known protein also has the following indication(s) and/or potential therapeutic use(s): Infection, rhinovirus. It has been investigated for clinical/therapeutic use in humans, for example as a target for an antibody or small molecule, and/or as a direct therapeutic; available information related to these investigations is as follows. Potential pharmaceutically related or therapeutically related activity or activities of the previously known protein are as follows: ICAM 1 antagonist; Immunostimulant; Protein synthesis antagonist. A therapeutic role for a protein represented by the cluster has been predicted. The cluster was assigned this field because there was information in the drug database or the public databases (e.g., described herein above) that this protein, or part thereof, is used or can be used for a potential therapeutic indication: Anti-inflammatory; Immunological; antibody; Antiallergic, non-asthma; Otological; Antiviral; GI inflammatory/bowel disorders; Cardiovascular; Antipruritic/inflammation, allergic; Anti-inflammatory, topical; Antiarthritic, immunological; Antisense therapy; Anti-infective; Anticancer; Prophylactic vaccine.

[1002] The following GO Annotation(s) apply to the previously known protein. The following annotation(s) were found: cell-cell adhesion, which are annotation(s) related to Biological Process; transmembrane receptor; protein binding, which are annotation(s) related to Molecular Function; and integral plasma membrane protein, which are annotation(s) related to Cellular Component.

[1003] The GO assignment relies on information from one or more of the SwissProt/TremBl Protein knowledgebase, available from <http://www.expasy.ch/sprot/>; or Locuslink, available from <http://www.ncbi.nlm.nih.gov/projects/LocusLink/>.

[1004] As noted above, cluster HUMICAMA1A features 6 transcript(s), which were listed in Table 1 above. These transcript(s) encode for protein(s) which are variant(s) of protein Intercellular adhesion molecule-1 precursor (SEQ ID NO:307). A description of each variant protein according to the present invention is now provided.

[1005] Variant protein HUMICAMA1A_PEA_{—}1_P2 (SEQ ID NO:309) according to the present invention has an amino acid sequence as given at the end of the application; it is encoded by transcript(s) HUMICAMA1A_PEA_{—}1_T2 (SEQ ID NO:279). An alignment is given to the known protein (Intercellular adhesion molecule-1 precursor (SEQ ID NO:307)) at the end of the application. One or more alignments to one or more previously published protein sequences are given at the end of the application. A brief description of the relationship of the variant protein according to the present invention to each such aligned protein is as follows:

[1006] Comparison report between HUMICAMA1A_PEA_{—}1_P2 (SEQ ID NO:309) and ICA1_HUMAN (SEQ ID NO:307):

[1007] 1. An isolated chimeric polypeptide encoding for HUMICAMA1A_PEA_{—}1_P2 (SEQ ID NO:309), comprising a first amino acid sequence being at least 90% homologous to MAPSSPRPALPALLVLLGALFPGPGNAQTSVSPSKVILPRGGSVLVTCSTSCDQPKLLGIE TPLPKKELLLPGNNRKVYELSNVQEDSQPMCYSNCPDGQSTAKTFLTVYWTPERVELA PLPSWQPVGKNLTLRCQVEGGAPRANLTVVLLRGEKELKREPAVGEPAEVTTTVLVRR DHHGANFSCRTELDLRPQGLELFENTSAPYQLQTFVLPATPPQLVSPRVLEVDTQGTVV CSLDGLFPVSEAQVHLALGDQRLNPTVTYGNDSFSAKASVSVTAEDEGTQRLTCAVILG NQSQETLQTVTIYS corresponding to amino acids 1-309 of ICA1_HUMAN (SEQ ID NO:307), which also corresponds to amino acids 1-309 of HUMICAMA1A_PEA_{—}1_P2 (SEQ ID NO:309), and a second amino acid sequence being at least 70%, optionally at least 80%, preferably at least 85%, more preferably at least 90% and most preferably at least 95% homologous to a polypeptide having the sequence KKGQGRSGASWGCDLNPGRGSLCAYSRLSGAQRDSDEARGLRRDRGDSEV (SEQ ID NO:479) corresponding to amino acids 310-359 of HUMICAMA1A_PEA_{—}1_P2 (SEQ ID NO:309), wherein said first amino acid sequence and second amino acid sequence are contiguous and in a sequential order.

[1008] 2. An isolated polypeptide encoding for a tail of HUMICAMA1A_PEA_{—}1_P2 (SEQ ID NO:309), comprising a polypeptide being at least 70%, optionally at least about 80%, preferably at least about 85%, more preferably at least about 90% and most preferably at least about 95% homologous to the sequence KKGQGRSGASWGCDLNPGRGSLCAYSRLSGAQRDSDEARGLRRDRGDSEV (SEQ ID NO:479) in HUMICAMA1A_PEA_{—}1_P2 (SEQ ID NO:309).

[1009] The location of the variant protein was determined according to results from a number of different software programs and analyses, including analyses from SignalP and other specialized programs. The variant protein is believed to be located as follows with regard to the cell: secreted. The protein localization is believed to be secreted because both signal-peptide prediction programs predict that this protein has a signal peptide, and neither trans-membrane region prediction program predicts that this protein has a trans-membrane region.

[1010] Variant protein HUMICAMA1A_PEA_{—}1_P2 (SEQ ID NO:309) also has the following non-silent SNPs (Single Nucleotide Polymorphisms) as listed in Table 7, (given according to their position(s) on the amino acid sequence, with the alternative amino acid(s) listed; the last column indicates whether the SNP is known or not; the presence of known SNPs in variant protein HUMICAMA1A_PEA_{—}1_P2 (SEQ ID NO:309) Sequence provides support for the deduced sequence of this variant protein according to the present invention).

TABLE 7
Amino acid mutations

| SNP position(s) on amino acid | | Previously |
|---|---|---|
| sequence | Alternative amino acid(s) | known SNP? |
| 56 | K -> M | Yes |
| 155 | K -> N | Yes |
| 238 | S -> | No |
| 241 | G -> R | Yes |
| 272 | A -> G | No |
| 272 | A -> | No |
| 285 | T -> A | No |
| 320 | W -> * | Yes |
| 342 | R -> H | Yes |

[1011] The glycosylation sites of variant protein HUMICAMA1A_PEA_{—}1_P2 (SEQ ID NO:309), as compared to the known protein Intercellular adhesion molecule-1 precursor (SEQ ID NO:307, are described in Table 8 (given according to their position(s) on the amino acid sequence in the first column; the second column indicates whether the glycosylation site is present in the variant protein; and the last column indicates whether the position is different on the variant protein).

TABLE 8
Glycosylation site(s)

| Position(s) on known amino | | Position in |
|---|---|---|
| acid sequence | Present in variant protein? | variant protein? |
| 385 | no | |
| 296 | yes | 296 |
| 202 | yes | 202 |
| 145 | yes | 145 |
| 130 | yes | 130 |
| 406 | no | |
| 183 | yes | 183 |
| 267 | yes | 267 |

[1012] Variant protein HUMICAMA1A_PEA_{—}1_P2 (SEQ ID NO:309) is encoded by the following transcript(s): HUMICAMA1A_PEA_{—}1_T2 (SEQ ID NO:279), for which the sequence(s) is/are given at the end of the application. The coding portion of transcript HUMICAMA1A_PEA_{—}1_T2 (SEQ ID NO:279) is shown in bold; this coding portion starts at position 1332 and ends at position 2408. The transcript also has the following SNPs as listed in Table 9 (given according to their position on the nucleotide sequence, with the alternative nucleic acid listed; the last column indicates whether the SNP is known or not; the presence of known SNPs in variant protein HUMICAMA1A_PEA_{—}1_P2 (SEQ ID NO:309) Sequence provides support for the deduced sequence of this variant protein according to the present invention).

TABLE 9
Nucleic acid SNPs

| SNP position on nucleotide | | Previously |
|---|---|---|
| sequence | Alternative nucleic acid | known SNP? |
| 1 | G -> C | No |
| 169 | G -> A | Yes |
| 490 | A -> | Yes |
| 1288 | C -> T | Yes |
| 1291 | T -> G | No |
| 1323 | A -> C | Yes |
| 1498 | A -> T | Yes |
| 1796 | G -> C | Yes |
| 2033 | C -> A | Yes |
| 2045 | C -> | No |
| 2052 | G -> A | Yes |
| 2054 | G -> T | Yes |
| 2146 | C -> | No |
| 2146 | C -> G | No |
| 2168 | C -> T | Yes |
| 2177 | C -> T | Yes |
| 2184 | A -> G | No |
| 2198 | G -> A | No |
| 2291 | G -> A | Yes |
| 2356 | G -> A | Yes |
| 2414 | C -> | No |
| 2414 | C -> G | No |
| 2468 | C -> T | Yes |
| 2508 | C -> T | Yes |
| 2534 | C -> | No |
| 2534 | C -> A | No |
| 2544 | G -> | No |
| 2598 | C -> | No |
| 2818 | A -> G | No |
| 2975 | C -> | No |
| 3064 | G -> T | No |
| 3119 | C -> | No |
| 3137 | G -> | No |
| 3446 | C -> | No |
| 3732 | T -> | No |
| 3732 | T -> C | No |
| 3859 | T -> A | No |
| 3866 | C -> T | No |
| 3982 | -> T | No |
| 4082 | -> G | No |
| 4082 | -> T | No |
| 4180 | G -> A | No |
| 4312 | T -> G | No |

[1013] Variant protein HUMICAMA1A_PEA_{—}1_P5 (SEQ ID NO:310) according to the present invention has an amino acid sequence as given at the end of the application; it is encoded by transcript(s) HUMICAMA1A_PEA_T5 (SEQ ID NO:281). An alignment is given to the known protein (Intercellular adhesion molecule-1 precursor (SEQ ID NO:307)) at the end of the application. One or more alignments to one or more previously published protein sequences are given at the end of the application. A brief description of the relationship of the variant protein according to the present invention to each such aligned protein is as follows:

[1014] Comparison report between HUMICAMA1A_PEA_{—}1_P5 (SEQ ID NO:310) and ICA1_HUMAN (SEQ ID NO:307):

[1015] 1. An isolated chimeric polypeptide encoding for HUMICAMA1A_PEA_{—}1_P5 (SEQ ID NO:310), comprising a first amino acid sequence being at least 90% homologous to MAPSSPRPALPALLVLLGALFPGPGNAQTSVSPSKVILPRGGSVLVTCSTSCDQPKLLGIE TPLPKKELLLPGNNRKVYELSNVQEDSQPMCYSNCPDGQSTAKTFLTVYWTPERVELA PLPSWQPVGKNLTLRCQVEGGAPRANLTVVLLRGEKELKREPAVGEPAEVTTTVLVRR DHHGANFSCRTELDLRPQGLELFENTSAPYQLQTFVLPATPPQLVSPRVLEVDTQGTVV CSLDGLFPVSEAQVHLALGDQRLNPTVTYGNDSFSAKASVSVTAEDEGTQRLTCAVILG NQSQETLQTVTIYSFPAPNVILTKPEVSEGTEVTVKCEAHPRAKVTLNGVPAQPLGPRA QLLLKATPEDNGRSFSCSATLEVAGQLIHKNQTRELRVL corresponding to amino acids 1-393 of ICA1_HUMAN (SEQ ID NO:307), which also corresponds to amino acids 1-393 of HUMICAMA1A_PEA_{—}1_P5 (SEQ ID NO:310), and a second amino acid sequence being at least 70%, optionally at least 80%, preferably at least 85%, more preferably at least 90% and most preferably at least 95% homologous to a polypeptide having the sequence CEWGCWSMAPIPQGPISLKVP (SEQ ID NO:480) corresponding to amino acids 394-414 of HUMICAMA1A_PEA_{—}1_P5 (SEQ ID NO:310), wherein said first amino acid sequence and second amino acid sequence are contiguous and in a sequential order.

[1016] 2. An isolated polypeptide encoding for a tail of HUMICAMA1A_PEA_{—}1_P5 (SEQ ID NO:310), comprising a polypeptide being at least 70%, optionally at least about 80%, preferably at least about 85%, more preferably at least about 90% and most preferably at least about 95% homologous to the sequence CEWGCWSMAPIPQGPISLKVP (SEQ ID NO:480) in HUMICAMA1A_PEA_{—}1_P5 (SEQ ID NO:310).

[1017] The location of the variant protein was determined according to results from a number of different software programs and analyses, including analyses from SignalP and other specialized programs. The variant protein is believed to be located as follows with regard to the cell: secreted. The protein localization is believed to be secreted because both signal-peptide prediction programs predict that this protein has a signal peptide, and neither trans-membrane region prediction program predicts that this protein has a trans-membrane region.

[1018] Variant protein HUMICAMA1A_PEA_{—}1_P5 (SEQ ID NO:310) also has the following non-silent SNPs (Single Nucleotide Polymorphisms) as listed in Table 10, (given according to their position(s) on the amino acid sequence, with the alternative amino acid(s) listed; the last column indicates whether the SNP is known or not; the presence of known SNPs in variant protein HUMICAMA1A_PEA_{—}1_P5 (SEQ ID NO:310) Sequence provides support for the deduced sequence of this variant protein according to the present invention).

TABLE 10
Amino acid mutations

| SNP position(s) on amino acid | | Previously |
|---|---|---|
| sequence | Alternative amino acid(s) | known SNP? |
| 56 | K -> M | Yes |
| 155 | K -> N | Yes |
| 238 | S -> | No |
| 241 | G -> R | Yes |
| 272 | A -> | No |
| 272 | A -> G | No |
| 285 | T -> A | No |
| 315 | V -> M | Yes |
| 334 | A -> G | No |
| 334 | A -> | No |
| 352 | P -> L | Yes |
| 374 | T -> | No |
| 374 | T -> N | No |
| 377 | V -> | No |

[1019] The glycosylation sites of variant protein HUMICAMA1A_PEA_{—}1_P5 (SEQ ID NO:310), as compared to the known protein Intercellular adhesion molecule-1 precursor (SEQ ID NO:307), are described in Table 11 (given according to their position(s) on the amino acid sequence in the first column; the second column indicates whether the glycosylation site is present in the variant protein; and the last column indicates whether the position is different on the variant protein).

TABLE 11
Glycosylation site(s)

| Position(s) on known amino | | Position in |
|---|---|---|
| acid sequence | Present in variant protein? | variant protein? |
| 385 | yes | 385 |
| 296 | yes | 296 |
| 202 | yes | 202 |
| 145 | yes | 145 |
| 130 | yes | 130 |
| 406 | no | |
| 183 | yes | 183 |
| 267 | yes | 267 |

[1020] Variant protein HUMICAMA1A_PEA_{—}1_P5 (SEQ ID NO:310) is encoded by the following transcript(s): HUMICAMA1A_PEA_{—}1_T5 (SEQ ID NO:281), for which the sequence(s) is/are given at the end of the application. The coding portion of transcript HUMICAMA1A_PEA_{—}1_T5 (SEQ ID NO:281) is shown in bold; this coding portion starts at position 1332 and ends at position 2573. The transcript also has the following SNPs as listed in Table 12 (given according to their position on the nucleotide sequence, with the alternative nucleic acid listed; the last column indicates whether the SNP is known or not; the presence of known SNPs in variant protein HUMICAMA1A_PEA_{—}1_P5 (SEQ ID NO:310) Sequence provides support for the deduced sequence of this variant protein according to the present invention).

TABLE 12
Nucleic acid SNPs

| SNP position on nucleotide | | Previously |
|---|---|---|
| sequence | Alternative nucleic acid | known SNP? |
| 1 | G -> C | No |
| 169 | G -> A | Yes |
| 490 | A -> | Yes |
| 1288 | C -> T | Yes |
| 1291 | T -> G | No |
| 1323 | A -> C | Yes |
| 1498 | A -> T | Yes |
| 1796 | G -> C | Yes |
| 2033 | C -> A | Yes |
| 2045 | C -> | No |
| 2052 | G -> A | Yes |
| 2054 | G -> T | Yes |
| 2146 | C -> | No |
| 2146 | C -> G | No |
| 2168 | C -> T | Yes |
| 2177 | C -> T | Yes |
| 2184 | A -> G | No |
| 2198 | G -> A | No |
| 2274 | G -> A | Yes |
| 2332 | C -> | No |
| 2332 | C -> G | No |
| 2386 | C -> T | Yes |
| 2426 | C -> T | Yes |
| 2452 | C -> | No |
| 2452 | C -> A | No |
| 2462 | G -> | No |
| 2641 | C -> | No |
| 2861 | A -> G | No |
| 3018 | C -> | No |
| 3107 | G -> T | No |
| 3162 | C -> | No |
| 3180 | G -> | No |
| 3489 | C -> | No |
| 3775 | T -> | No |
| 3775 | T -> C | No |
| 3902 | T -> A | No |
| 3909 | C -> T | No |
| 4025 | -> T | No |
| 4125 | -> G | No |
| 4125 | -> T | No |
| 4223 | G -> A | No |
| 4355 | T -> G | No |

[1021] Variant protein HUMICAMA1A_PEA_{—}1_P8 (SEQ ID NO:311) according to the present invention has an amino acid sequence as given at the end of the application; it is encoded by transcript(s) HUMICAMA1A_PEA_{—}1_T8 (SEQ ID NO:282). An alignment is given to the known protein (Intercellular adhesion molecule-1 precursor (SEQ ID NO:307)) at the end of the application. One or more alignments to one or more previously published protein sequences are given at the end of the application. A brief description of the relationship of the variant protein according to the present invention to each such aligned protein is as follows:

[1022] Comparison report between HUMICAMA1A_PEA_{—}1_P8 (SEQ ID NO:311) and ICA1_HUMAN-V1 (SEQ ID NO:308):

[1023] 1. An isolated chimeric polypeptide encoding for HUMICAMA1A_PEA_{—}1_P8 (SEQ ID NO:311), comprising a first amino acid sequence being at least 90% homologous to MAPSSPRPALPALLVLLGALFPG corresponding to amino acids 1-23 of ICA1_HUMAN_V1 (SEQ ID NO:308), which also corresponds to amino acids 1-23 of HUMICAMA1A_PEA_{—}1_P8 (SEQ ID NO:311), and a second amino acid sequence being at least 90% homologous to TPERVELAPLPSWQPVGKNLTLRCQVEGGAPRANLTVVLLRGEKELKREPAVGEPAEV TTTVLVRRDHHGANFSCRTELDLRPQGLELFENTSAPYQLQTFVLPATPPQLVSPRVLE VDTQGTVVCSLDGLFPVSEAQVHLALGDQRLNPTVTYGNDSFSAKASVSVTAEDEGTQ RLTCAVILGNQSQETLQTVTIYSFPAPNVILTKPEVSEGTEVTVKCEAHPRAKVTLNGVP AQPLGPRAQLLLKATPEDNGRSFSCSATLEVAGQLIHKNQTRELRVLYGPRLDERDCPG NWTWPENSQQTPMCQAWGNPLPELKCLKDGTFPLPIGESVTVTRDLEGTYLCRARSTQ GEVTRKVTVNVLSPRYEIVIITVVAAAVIMGTAGLSTYLYNRQRKIKKYRLQQAQKGTP MKPNTQATPP corresponding to amino acids 112-532 of ICA1_HUMAN_V1 (SEQ ID NO:308), which also corresponds to amino acids 24-444 of HUMICAMA1A_PEA_{—}1_P8 (SEQ ID NO:311), wherein said first amino acid sequence and second amino acid sequence are contiguous and in a sequential order.

[1024] 2. An isolated chimeric polypeptide encoding for an edge portion of HUMICAMA1A_PEA_{—}1_P8 (SEQ ID NO:311), comprising a polypeptide having a length “n”, wherein n is at least about 10 amino acids in length, optionally at least about 20 amino acids in length, preferably at least about 30 amino acids in length, more preferably at least about 40 amino acids in length and most preferably at least about 50 amino acids in length, wherein at least two amino acids comprise GT, having a structure as follows: a sequence starting from any of amino acid numbers 23−x to 23; and ending at any of amino acid numbers 24+((n−2)−x), in which x varies from 0 to n−2.

[1025] It should be noted that the known protein sequence (ICA1_HUMAN (SEQ ID NO:307)) has one or more changes than the sequence given at the end of the application and named as being the amino acid sequence for ICA1_HUMAN_V1 (SEQ ID NO:308). These changes were previously known to occur and are listed in the table below.

TABLE 13
Changes to ICA1_HUMAN_V1 (SEQ ID NO: 308)

| SNP position(s) on | |
|---|---|
| amino acid sequence | Type of change |
| 470 | variant |

[1026] The location of the variant protein was determined according to results from a number of different software programs and analyses, including analyses from SignalP and other specialized programs. The variant protein is believed to be located as follows with regard to the cell: membrane. The protein localization is believed to be membrane because although both signal-peptide prediction programs agree that this protein has a signal peptide, both trans-membrane region prediction programs predict that this protein has a trans-membrane region downstream of this signal peptide.

[1027] Variant protein HUMICAMA1A_PEA_{—}1_P8 (SEQ ID NO:311) also has the following non-silent SNPs (Single Nucleotide Polymorphisms) as listed in Table 14, (given according to their position(s) on the amino acid sequence, with the alternative amino acid(s) listed; the last column indicates whether the SNP is known or not; the presence of known SNPs in variant protein HUMICAMA1A_PEA_{—}1_P8 (SEQ ID NO:311) Sequence provides support for the deduced sequence of this variant protein according to the present invention).

TABLE 14
Amino acid mutations

| SNP position(s) on | | |
|---|---|---|
| amino acid sequence | Alternative amino acid(s) | Previously known SNP? |
| 67 | K -> N | Yes |
| 150 | S -> | No |
| 153 | G -> R | Yes |
| 184 | A -> | No |
| 184 | A -> G | No |
| 197 | T -> A | No |
| 227 | V -> M | Yes |
| 246 | A -> G | No |
| 246 | A -> | No |
| 264 | P -> L | Yes |
| 286 | T -> | No |
| 286 | T -> N | No |
| 289 | V -> | No |
| 307 | G -> | No |
| 381 | K -> E | No |
| 433 | T -> | No |

[1028] Variant protein HUMICAMA1A_PEA_{—}1_P8 (SEQ ID NO:311) is encoded by the following transcript(s): HUMICAMA1A_PEA_{—}1_T8 (SEQ ID NO:282), for which the sequence(s) is/are given at the end of the application. The coding portion of transcript HUMICAMA1A_PEA_{—}1_T8 (SEQ ID NO:282) is shown in bold; this coding portion starts at position 1332 and ends at position 2663. The transcript also has the following SNPs as listed in Table 15 (given according to their position on the nucleotide sequence, with the alternative nucleic acid listed; the last column indicates whether the SNP is known or not; the presence of known SNPs in variant protein HUMICAMA1A_PEA_{—}1_P8 (SEQ ID NO:311) Sequence provides support for the deduced sequence of this variant protein according to the present invention).

TABLE 15
Nucleic acid SNPs

| SNP position on | | |
|---|---|---|
| nucleotide sequence | Alternative nucleic acid | Previously known SNP? |
| 1 | G -> C | No |
| 169 | G -> A | Yes |
| 490 | A -> | Yes |
| 1288 | C -> T | Yes |
| 1291 | T -> G | No |
| 1323 | A -> C | Yes |
| 1532 | G -> C | Yes |
| 1769 | C -> A | Yes |
| 1781 | C -> | No |
| 1788 | G -> A | Yes |
| 1790 | G -> T | Yes |
| 1882 | C -> | No |
| 1882 | C -> G | No |
| 1904 | C -> T | Yes |
| 1913 | C -> T | Yes |
| 1920 | A -> G | No |
| 1934 | G -> A | No |
| 2010 | G -> A | Yes |
| 2068 | C -> | No |
| 2068 | C -> G | No |
| 2122 | C -> T | Yes |
| 2162 | C -> T | Yes |
| 2188 | C -> | No |
| 2188 | C -> A | No |
| 2198 | G -> | No |
| 2252 | C -> | No |
| 2472 | A -> G | No |
| 2629 | C -> | No |
| 2718 | G -> T | No |
| 2773 | C -> | No |
| 2791 | G -> | No |
| 3100 | C -> | No |
| 3386 | T -> | No |
| 3386 | T -> C | No |
| 3513 | T -> A | No |
| 3520 | C -> T | No |
| 3636 | -> T | No |
| 3736 | -> G | No |
| 3736 | -> T | No |
| 3834 | G -> A | No |
| 3966 | T -> G | No |

[1029] Variant protein HUMICAMA1A_PEA_{—}1_P15 (SEQ ID NO:312) according to the present invention has an amino acid sequence as given at the end of the application; it is encoded by transcript(s) HUMICAMA1A_PEA_{—}1_T4 (SEQ ID NO:280). An alignment is given to the known protein (Intercellular adhesion molecule-1 precursor (SEQ ID NO:307)) at the end of the application. One or more alignments to one or more previously published protein sequences are given at the end of the application. A brief description of the relationship of the variant protein according to the present invention to each such aligned protein is as follows:

[1030] Comparison report between HUMICAMA1A_PEA_{—}1_P15 (SEQ ID NO:312) and ICA1_HUMAN (SEQ ID NO:307):

[1031] 1. An isolated chimeric polypeptide encoding for HUMICAMA1A_PEA_{—}1_P15 (SEQ ID NO:312), comprising a first amino acid sequence being at least 90% homologous to MAPSSPRPALPALLVLLGALFPGPGNAQTSVSPSKVILPRGGSVLVTCSTSCDQPKLLGIE TPLPKKELLLPGNNRKVYELSNVQEDSQPMCYSNCPDGQSTAKTFLTVYWTPERVELA PLPSWQPVGKNLTLRCQVEGGAPRANLTVVLLRGEKELKREPAVGEPAEVTTTVLVRR DHHGANFSCRTELDLRPQGLELFENTSAPYQLQTF corresponding to amino acids 1-212 of ICA1_HUMAN (SEQ ID NO:307), which also corresponds to amino acids 1-212 of HUMICAMA1A_PEA_{—}1_P15 (SEQ ID NO:312), and a second amino acid sequence being at least 70%, optionally at least 80%, preferably at least 85%, more preferably at least 90% and most preferably at least 95% homologous to a polypeptide having the sequence GED corresponding to amino acids 213-215 of HUMICAMA1A_PEA_{—}1_P15 (SEQ ID NO:312), wherein said first amino acid sequence and second amino acid sequence are contiguous and in a sequential order.

[1032] The location of the variant protein was determined according to results from a number of different software programs and analyses, including analyses from SignalP and other specialized programs. The variant protein is believed to be located as follows with regard to the cell: secreted. The protein localization is believed to be secreted because both signal-peptide prediction programs predict that this protein has a signal peptide, and neither trans-membrane region prediction program predicts that this protein has a trans-membrane region.

[1033] Variant protein HUMICAMA1A_PEA_{—}1_P15 (SEQ ID NO:312) also has the following non-silent SNPs (Single Nucleotide Polymorphisms) as listed in Table 16, (given according to their position(s) on the amino acid sequence, with the alternative amino acid(s) listed; the last column indicates whether the SNP is known or not; the presence of known SNPs in variant protein HUMICAMA1A_PEA_{—}1_P15 (SEQ ID NO:312) Sequence provides support for the deduced sequence of this variant protein according to the present invention).

TABLE 16
Amino acid mutations

| SNP position(s) on | | |
|---|---|---|
| amino acid sequence | Alternative amino acid(s) | Previously known SNP? |
| 56 | K -> M | Yes |
| 155 | K -> N | Yes |

[1034] The glycosylation sites of variant protein HUMICAMA1A_PEA_{—}1_P15 (SEQ ID NO:312), as compared to the known protein Intercellular adhesion molecule-1 precursor (SEQ ID NO:307), are described in Table 17 (given according to their position(s) on the amino acid sequence in the first column; the second column indicates whether the glycosylation site is present in the variant protein; and the last column indicates whether the position is different on the variant protein).

TABLE 17
Glycosylation site(s)

| Position(s) on known | Present | |
|---|---|---|
| amino acid sequence | in variant protein? | Position in variant protein? |
| 385 | no | |
| 296 | no | |
| 202 | yes | 202 |
| 145 | yes | 145 |
| 130 | yes | 130 |
| 406 | no | |
| 183 | yes | 183 |
| 267 | no | |

[1035] Variant protein HUMICAMA1A_PEA_{—}1_P15 (SEQ ID NO: 312) is encoded by the following transcript(s): HUMICAMA1A_PEA_{—}1_T4 (SEQ ID NO:280), for which the sequence(s) is/are given at the end of the application. The coding portion of transcript HUMICAMA1A_PEA_{—}1_T4 (SEQ ID NO:280) is shown in bold; this coding portion starts at position 1332 and ends at position 1976. The transcript also has the following SNPs as listed in Table 18 (given according to their position on the nucleotide sequence, with the alternative nucleic acid listed; the last column indicates whether the SNP is known or not; the presence of known SNPs in variant protein HUMICAMA1A_PEA_{—}1_P15 (SEQ ID NO:312) Sequence provides support for the deduced sequence of this variant protein according to the present invention).

TABLE 18
Nucleic acid SNPs

| SNP position on | | |
|---|---|---|
| nucleotide sequence | Alternative nucleic acid | Previously known SNP? |
| 1 | G -> C | No |
| 169 | G -> A | Yes |
| 490 | A -> | Yes |
| 1288 | C -> T | Yes |
| 1291 | T -> G | No |
| 1323 | A -> C | Yes |
| 1498 | A -> T | Yes |
| 1796 | G -> C | Yes |
| 2023 | C -> T | Yes |
| 2094 | A -> G | No |
| 2132 | T -> C | No |
| 2279 | C -> A | Yes |
| 2291 | C -> | No |
| 2298 | G -> A | Yes |
| 2300 | G -> T | Yes |
| 2392 | C -> | No |
| 2392 | C -> G | No |
| 2414 | C -> T | Yes |
| 2423 | C -> T | Yes |
| 2430 | A -> G | No |
| 2444 | G -> A | No |
| 2520 | G -> A | Yes |
| 2578 | C -> | No |
| 2578 | C -> G | No |
| 2632 | C -> T | Yes |
| 2672 | C -> T | Yes |
| 2698 | C -> | No |
| 2698 | C -> A | No |
| 2708 | G -> | No |
| 2762 | C -> | No |
| 2982 | A -> G | No |
| 3139 | C -> | No |
| 3228 | G -> T | No |
| 3283 | C -> | No |
| 3301 | G -> | No |
| 3610 | C -> | No |
| 3896 | T -> | No |
| 3896 | T -> C | No |
| 4023 | T -> A | No |
| 4030 | C -> T | No |
| 4146 | -> T | No |
| 4246 | -> G | No |
| 4246 | -> T | No |
| 4344 | G -> A | No |
| 4476 | T -> G | No |

[1036] As noted above, cluster HUMICAMA1A features 22 segment(s), which were listed in Table 2 above and for which the sequence(s) are given at the end of the application. These segment(s) are portions of nucleic acid sequence(s) which are described herein separately because they are of particular interest. A description of each segment according to the present invention is now provided.

[1037] Segment cluster HUMICAMA1A_PEA_node_{—}0 (SEQ ID NO:285) according to the present invention is supported by 50 libraries. The number of libraries was determined as previously described. This segment can be found in the following transcript(s): HUMICAMA1A_PEA_{—}1_T2 (SEQ ID NO:279), HUMICAMA1A_PEA_{—}1_T4 (SEQ ID NO:280), HUMICAMA1A_PEA_{—}1_T5 (SEQ ID NO:281), HUMICAMA1A_PEA_{—}1_T8 (SEQ ID NO:282), HUMICAMA1A_PEA-1-T12 (SEQ ID NO:283) and HUMICAMA1A_PEA_{—}1_T16 (SEQ ID NO:284). Table 19 below describes the starting and ending position of this segment on each transcript.

TABLE 19
Segment location on transcripts

| | Segment | |
|---|---|---|
| | starting | Segment |
| Transcript name | position | ending position |
| HUMICAMA1A_PEA_1_T2 (SEQ ID | 1 | 1398 |
| NO: 279) | | |
| HUMICAMA1A_PEA_1_T4 (SEQ ID | 1 | 1398 |
| NO: 280) | | |
| HUMICAMA1A_PEA_1_T5 (SEQ ID | 1 | 1398 |
| NO: 281) | | |
| HUMICAMA1A_PEA_1_T8 (SEQ ID | 1 | 1398 |
| NO: 282) | | |
| HUMICAMA1A_PEA_1_T12 (SEQ | 1 | 1398 |
| ID NO: 283) | | |
| HUMICAMA1A_PEA_1_T16 (SEQ | 1 | 1398 |
| ID NO: 284) | | |

[1038] Segment cluster HUMICAMA1A_PEA_{—}1_node_{—}3 (SEQ ID NO:286) according to the present invention is supported by 66 libraries. The number of libraries was determined as previously described. This segment can be found in the following transcript(s): HUMICAMA1A_PEA_{—}1_T2 (SEQ ID NO:279), HUMICAMA1A_PEA_{—}1_T4 (SEQ ID NO:280), HUMICAMA1A_PEA_{—}1_T5 (SEQ ID NO:281), HUMICAMA1A_PEA_{—}1_T12 (SEQ ID NO:283) and HUMICAMA1A_PEA_{—}1_T16 (SEQ ID NO:284). Table 20 below describes the starting and ending position of this segment on each transcript.

TABLE 20
Segment location on transcripts

| | | Segment |
|---|---|---|
| | Segment | ending |
| Transcript name | starting position | position |
| HUMICAMA1A_PEA_1_T2 (SEQ ID | 1464 | 1620 |
| NO: 279) | | |
| HUMICAMA1A_PEA_1_T4 (SEQ ID | 1464 | 1620 |
| NO: 280) | | |
| HUMICAMA1A_PEA_1_T5 (SEQ ID | 1464 | 1620 |
| NO: 281) | | |
| HUMICAMA1A_PEA_1_T12 (SEQ | 1464 | 1620 |
| ID NO: 283) | | |
| HUMICAMA1A_PEA_1_T16 (SEQ | 1464 | 1620 |
| ID NO: 284) | | |

[1039] Segment cluster HUMICAMA1A_PEA_{—}1_node_{—}12 (SEQ ID NO:287) according to the present invention is supported by 87 libraries. The number of libraries was determined as previously described. This segment can be found in the following transcript(s): HUMICAMA1A_PEA_{—}1_T2 (SEQ ID NO:279), HUMICAMA1A_PEA_{—}1_T4 (SEQ ID NO:280), HUMICAMA1A_PEA_{—}1_T5 (SEQ ID NO:281), HUMICAMA1A_PEA_{—}1_T8 (SEQ ID NO:282), HUMICAMA1A_PEA_{—}1_T12 (SEQ ID NO:283) and HUMICAMA1A_PEA_{—}1_T16 (SEQ ID NO:284). Table 21 below describes the starting and ending position of this segment on each transcript.

TABLE 21
Segment location on transcripts

| | | Segment |
|---|---|---|
| | Segment | ending |
| Transcript name | starting position | position |
| HUMICAMA1A_PEA_1_T2 (SEQ ID | 1663 | 1968 |
| NO: 279) | | |
| HUMICAMA1A_PEA_1_T4 (SEQ ID | 1663 | 1968 |
| NO: 280) | | |
| HUMICAMA1A_PEA_1_T5 (SEQ ID | 1663 | 1968 |
| NO: 281) | | |
| HUMICAMA1A_PEA_1_T8 (SEQ ID | 1399 | 1704 |
| NO: 282) | | |
| HUMICAMA1A_PEA_1_T12 (SEQ | 1663 | 1968 |
| ID NO: 283) | | |
| HUMICAMA1A_PEA_1_T16 (SEQ | 1663 | 1968 |
| ID NO: 284) | | |

[1040] Segment cluster HUMICAMA1A_PEA_node_{—}13 (SEQ ID NO:288) according to the present invention is supported by 3 libraries. The number of libraries was determined as previously described. This segment can be found in the following transcript(s): HUMICAMA1A_PEA_{—}1_T4 (SEQ ID NO:280). Table 22 below describes the starting and ending position of this segment on each transcript.

TABLE 22
Segment location on transcripts

| | | Segment |
|---|---|---|
| | Segment | ending |
| Transcript name | starting position | position |
| HUMICAMA1A_PEA_1_T4 (SEQ ID | 1969 | 2214 |
| NO: 280) | | |

[1041] Segment cluster HUMICAMA1A_PEA_{—}1_node_{—}14 (SEQ ID NO:289) according to the present invention is supported by 88 libraries. The number of libraries was determined as previously described. This segment can be found in the following transcript(s): HUMICAMA1A_PEA_{—}1_T2 (SEQ ID NO:279), HUMICAMA1A_PEA_{—}1_T4 (SEQ ID NO:280), HUMICAMA1A_PEA_{—}1_T5 (SEQ ID NO:281), HUMICAMA1A_PEA_{—}1_T8 (SEQ ID NO:282), HUMICAMA1A_PEA_{—}1_T12 (SEQ ID NO:283) and HUMICAMA1A_PEA_{—}1_T16 (SEQ ID NO:284). Table 23 below describes the starting and ending position of this segment on each transcript.

TABLE 23
Segment location on transcripts

| | Segment | |
|---|---|---|
| | starting | Segment |
| Transcript name | position | ending position |
| HUMICAMA1A_PEA_1_T2 (SEQ ID | 1969 | 2256 |
| NO: 279) | | |
| HUMICAMA1A_PEA_1_T4 (SEQ ID | 2215 | 2502 |
| NO: 280) | | |
| HUMICAMA1A_PEA_1_T5 (SEQ ID | 1969 | 2256 |
| NO: 281) | | |
| HUMICAMA1A_PEA_1_T8 (SEQ ID | 1705 | 1992 |
| NO: 282) | | |
| HUMICAMA1A_PEA_1_T12 (SEQ | 1969 | 2256 |
| ID NO: 283) | | |
| HUMICAMA1A_PEA_1_T16 (SEQ | 1969 | 2256 |
| ID NO: 284) | | |

[1042] Segment cluster HUMICAMA1A_PEA_{—}1_node_{—}20 (SEQ ID NO:290) according to the present invention is supported by 7 libraries. The number of libraries was determined as previously described. This segment can be found in the following transcript(s): HUMICAMA1A_PEA_{—}1_T5 (SEQ ID NO:281), HUMICAMA1A_PEA_{—}1_T12 (SEQ ID NO:283) and HUMICAMA1A_PEA_{—}1_T16 (SEQ ID NO:284). Table 24 below describes the starting and ending position of this segment on each transcript.

TABLE 24
Segment location on transcripts

| | Segment | |
|---|---|---|
| | starting | Segment |
| Transcript name | position | ending position |
| HUMICAMA1A_PEA_1_T5 (SEQ ID | 2512 | 2636 |
| NO: 281) | | |
| HUMICAMA1A_PEA_1_T12 (SEQ | 2512 | 2636 |
| ID NO: 283) | | |
| HUMICAMA1A_PEA_1_T16 (SEQ | 2512 | 2636 |
| ID NO: 284) | | |

[1043] Segment cluster HUMICAMA1A_PEA_{—}1_node_{—}21 (SEQ ID NO:291) according to the present invention is supported by 91 libraries. The number of libraries was determined as previously described. This segment can be found in the following transcript(s): HUMICAMA1A_PEA-1_T2 (SEQ ID NO:279), HUMICAMA1A_PEA_{—}1_T4 (SEQ ID NO:280), HUMICAMA1A_PEA_{—}1_T5 (SEQ ID NO:281), HUMICAMA1A_PEA_{—}1_T8 (SEQ ID NO:282), HUMICAMA1A_PEA_{—}1_T12 (SEQ ID NO:283) and HUMICAMA1A_PEA_{—}1_T16 (SEQ ID NO:284). Table 25 below describes the starting and ending position of this segment on each transcript.

TABLE 25
Segment location on transcripts

| | Segment | |
|---|---|---|
| | starting | Segment |
| Transcript name | position | ending position |
| HUMICAMA1A_PEA_1_T2 (SEQ ID | 2594 | 2820 |
| NO: 279) | | |
| HUMICAMA1A_PEA_1_T4 (SEQ ID | 2758 | 2984 |
| NO: 280) | | |
| HUMICAMA1A_PEA_1_T5 (SEQ ID | 2637 | 2863 |
| NO: 281) | | |
| HUMICAMA1A_PEA_1_T8 (SEQ ID | 2248 | 2474 |
| NO: 282) | | |
| HUMICAMA1A_PEA_1_T12 (SEQ | 2637 | 2863 |
| ID NO: 283) | | |
| HUMICAMA1A_PEA_1_T16 (SEQ | 2637 | 2863 |
| ID NO: 284) | | |

[1044] Segment cluster HUMICAMA1A_PEA_{—}1_node_{—}24 (SEQ ID NO:292) according to the present invention is supported by 109 libraries. The number of libraries was determined as previously described. This segment can be found in the following transcript(s): HUMICAMA1A_PEA_{—}1_T2 (SEQ ID NO:279), HUMICAMA1A_PEA_{—}1_T4 (SEQ ID NO:280), HUMICAMA1A_PEA_{—}1_T5 (SEQ ID NO:281), HUMICAMA1A_PEA_{—}1_T8 (SEQ ID NO:282), HUMICAMA1A_PEA_{—}1_T12 (SEQ ID NO:283) and HUMICAMA1A_PEA_T16 (SEQ ID NO:284). Table 26 below describes the starting and ending position of this segment on each transcript.

TABLE 26
Segment location on transcripts

| | Segment | |
|---|---|---|
| | starting | Segment |
| Transcript name | position | ending position |
| HUMICAMA1A_PEA_1_T2 (SEQ ID | 2840 | 2986 |
| NO: 279) | | |
| HUMICAMA1A_PEA_1_T4 (SEQ ID | 3004 | 3150 |
| NO: 280) | | |
| HUMICAMA1A_PEA_1_T5 (SEQ ID | 2883 | 3029 |
| NO: 281) | | |
| HUMICAMA1A_PEA_1_T8 (SEQ ID | 2494 | 2640 |
| NO: 282) | | |
| HUMICAMA1A_PEA_1_T12 (SEQ | 2969 | 3115 |
| ID NO: 283) | | |
| HUMICAMA1A_PEA_1_T16 (SEQ | 2969 | 3115 |
| ID NO: 284) | | |

[1045] Segment cluster HUMICAMA1A_PEA_{—}1_node_{—}25 (SEQ ID NO:293) according to the present invention is supported by 108 libraries. The number of libraries was determined as previously described. This segment can be found in the following transcript(s): HUMICAMA1A_PEA_{—}1_T2 (SEQ ID NO:279), HUMICAMA1A_PEA_{—}1_T4 (SEQ ID NO:280), HUMICAMA1A_PEA_{—}1_T5 (SEQ ID NO:281), HUMICAMA1A_PEA_{—}1_T8 (SEQ ID NO:282) and HUMICAMA1A_PEA_{—}1_T12 (SEQ ID NO:283). Table 27 below describes the starting and ending position of this segment on each transcript.

TABLE 27
Segment location on transcripts

| | Segment | |
|---|---|---|
| | starting | Segment |
| Transcript name | position | ending position |
| HUMICAMA1A_PEA_1_T2 (SEQ ID | 2987 | 3118 |
| NO: 279) | | |
| HUMICAMA1A_PEA_1_T4 (SEQ ID | 3151 | 3282 |
| NO: 280) | | |
| HUMICAMA1A_PEA_1_T5 (SEQ ID | 3030 | 3161 |
| NO: 281) | | |
| HUMICAMA1A_PEA_1_T8 (SEQ ID | 2641 | 2772 |
| NO: 282) | | |
| HUMICAMA1A_PEA_1_T12 (SEQ | 3116 | 3247 |
| ID NO: 283) | | |

[1046] Segment cluster HUMICAMA1A_PEA_{—}1_node_{—}27 (SEQ ID NO:294) according to the present invention is supported by 225 libraries. The number of libraries was determined as previously described. This segment can be found in the following transcript(s): HUMICAMA1A_PEA_{—}1_T2 (SEQ ID NO:279), HUMICAMA1A_PEA_{—}1_T4 (SEQ ID NO:280), HUMICAMA1A_PEA_{—}1_T5 (SEQ ID NO:281), HUMICAMA1A_PEA_{—}1_T8 (SEQ ID NO:282) and HUMICAMA1A_PEA_{—}1_T12 (SEQ ID NO:283). Table 28 below describes the starting and ending position of this segment on each transcript.

TABLE 28
Segment location on transcripts

| | Segment | |
|---|---|---|
| | starting | Segment |
| Transcript name | position | ending position |
| HUMICAMA1A_PEA_1_T2 (SEQ ID | 3138 | 4204 |
| NO: 279) | | |
| HUMICAMA1A_PEA_1_T4 (SEQ ID | 3302 | 4368 |
| NO: 280) | | |
| HUMICAMA1A_PEA_1_T5 (SEQ ID | 3181 | 4247 |
| NO: 281) | | |
| HUMICAMA1A_PEA_1_T8 (SEQ ID | 2792 | 3858 |
| NO: 282) | | |
| HUMICAMA1A_PEA_1_T12 (SEQ | 3267 | 4333 |
| ID NO: 283) | | |

[1047] Segment cluster HUMICAMA1A_PEA_{—}1_node_{—}29 (SEQ ID NO:295) according to the present invention is supported by 53 libraries. The number of libraries was determined as previously described. This segment can be found in the following transcript(s): HUMICAMA1A_PEA_{—}1_T2 (SEQ ID NO:279), HUMICAMA1A_PEA_{—}1_T4 (SEQ ID NO:280), HUMICAMA1A_PEA_{—}1_T5 (SEQ ID NO:281), HUMICAMA1A_PEA_{—}1_T8 (SEQ ID NO:282) and HUMICAMA1A_PEA_{—}1_T12 (SEQ ID NO:283). Table 29 below describes the starting and ending position of this segment on each transcript.

TABLE 29
Segment location on transcripts

| | Segment | |
|---|---|---|
| | starting | Segment |
| Transcript name | position | ending position |
| HUMICAMA1A_PEA_1_T2 (SEQ ID | 4209 | 4341 |
| NO: 279) | | |
| HUMICAMA1A_PEA_1_T4 (SEQ ID | 4373 | 4505 |
| NO: 280) | | |
| HUMICAMA1A_PEA_1_T5 (SEQ ID | 4252 | 4384 |
| NO: 281) | | |
| HUMICAMA1A_PEA_1_T8 (SEQ ID | 3863 | 3995 |
| NO: 282) | | |
| HUMICAMA1A_PEA_1_T12 (SEQ | 4338 | 4470 |
| ID NO: 283) | | |

[1048] According to an optional embodiment of the present invention, short segments related to the above cluster are also provided. These segments are up to about 120 bp in length, and so are included in a separate description.

[1049] Segment cluster HUMICAMA1A_PEA_{—}1_node_{—}2 (SEQ ID NO:296) according to the present invention is supported by 58 libraries. The number of libraries was determined as previously described. This segment can be found in the following transcript(s): HUMICAMA1A_PEA_{—}1_T2 (SEQ ID NO:279), HUMICAMA1A_PEA_{—}1_T4 (SEQ ID NO:280), HUMICAMA1A_PEA_{—}1_T5 (SEQ ID NO:281), HUMICAMA1A_PEA_{—}1_T12 (SEQ ID NO:283) and HUMICAMA1A_PEA_{—}1_T16 (SEQ ID NO:284). Table 30 below describes the starting and ending position of this segment on each transcript.

TABLE 30
Segment location on transcripts

| | Segment | |
|---|---|---|
| | starting | Segment |
| Transcript name | position | ending position |
| HUMICAMA1A_PEA_1_T2 (SEQ ID | 1399 | 1463 |
| NO: 279) | | |
| HUMICAMA1A_PEA_1_T4 (SEQ ID | 1399 | 1463 |
| NO: 280) | | |
| HUMICAMA1A_PEA_1_T5 (SEQ ID | 1399 | 1463 |
| NO: 281) | | |
| HUMICAMA1A_PEA_1_T12 (SEQ | 1399 | 1463 |
| ID NO: 283) | | |
| HUMICAMA1A_PEA_1_T16 (SEQ | 1399 | 1463 |
| ID NO: 284) | | |

[1050] Segment cluster HUMICAMA1A_PEA_{—}1_node_{—}4 (SEQ ID NO:297) according to the present invention is supported by 62 libraries. The number of libraries was determined as previously described. This segment can be found in the following transcript(s): HUMICAMA1A_PEA_{—}1_T2 (SEQ ID NO:279), HUMICAMA1A_PEA_{—}1_T4 (SEQ ID NO:280), HUMICAMA1A_PEA_{—}1_T5 (SEQ ID NO:281), HUMICAMA1A_PEA_{—}1_T12 (SEQ ID NO:283) and HUMICAMA1A_PEA_{—}1_T16 (SEQ ID NO:284). Table 31 below describes the starting and ending position of this segment on each transcript.

TABLE 31
Segment location on transcripts

| | Segment | |
|---|---|---|
| | starting | Segment |
| Transcript name | position | ending position |
| HUMICAMA1A_PEA_1_T2 (SEQ ID | 1621 | 1662 |
| NO: 279) | | |
| HUMICAMA1A_PEA_1_T4 (SEQ ID | 1621 | 1662 |
| NO: 280) | | |
| HUMICAMA1A_PEA_1_T5 (SEQ ID | 1621 | 1662 |
| NO: 281) | | |
| HUMICAMA1A_PEA_1_T12 (SEQ | 1621 | 1662 |
| ID NO: 283) | | |
| HUMICAMA1A_PEA_1_T16 (SEQ | 1621 | 1662 |
| ID NO: 284) | | |

[1051] Segment cluster HUMICAMA1A_PEA_{—}1_node_{—}15 (SEQ ID NO:298) according to the present invention is supported by 4 libraries. The number of libraries was determined as previously described. This segment can be found in the following transcript(s): HUMICAMA1A_PEA_{—}1_T2 (SEQ ID NO:279). Table 32 below describes the starting and ending position of this segment on each transcript.

TABLE 32
Segment location on transcripts

| | Segment | |
|---|---|---|
| | starting | Segment |
| Transcript name | position | ending position |
| HUMICAMA1A_PEA_1_T2 (SEQ ID | 2257 | 2338 |
| NO: 279) | | |

[1052] Segment cluster HUMICAMA1A_PEA_{—}1_node_{—}16 (SEQ ID NO:299) according to the present invention is supported by 58 libraries. The number of libraries was determined as previously described. This segment can be found in the following transcript(s): HUMICAMA1A_PEA_{—}1_T2 (SEQ ID NO:279), HUMICAMA1A_PEA_{—}1_T4 (SEQ ID NO:280), HUMICAMA1A_PEA_{—}1_T5 (SEQ ID NO:281), HUMICAMA1A_PEA_{—}1_T8 (SEQ ID NO:282), HUMICAMA1A_PEA_{—}1_T12 (SEQ ID NO:283) and HUMICAMA1A_PEA_{—}1_T16 (SEQ ID NO:284). Table 33 below describes the starting and ending position of this segment on each transcript.

TABLE 33
Segment location on transcripts

| | Segment | |
|---|---|---|
| | starting | Segment |
| Transcript name | position | ending position |
| HUMICAMA1A_PEA_1_T2 (SEQ ID | 2339 | 2457 |
| NO: 279) | | |
| HUMICAMA1A_PEA_1_T4 (SEQ ID | 2503 | 2621 |
| NO: 280) | | |
| HUMICAMA1A_PEA_1_T5 (SEQ ID | 2257 | 2375 |
| NO: 281) | | |
| HUMICAMA1A_PEA_1_T8 (SEQ ID | 1993 | 2111 |
| NO: 282) | | |
| HUMICAMA1A_PEA_1_T12 (SEQ | 2257 | 2375 |
| ID NO: 283) | | |
| HUMICAMA1A_PEA_1_T16 (SEQ | 2257 | 2375 |
| ID NO: 284) | | |

[1053] Segment cluster HUMICAMA1A_PEA_{—}1_node_{—}17 (SEQ ID NO:300) according to the present invention can be found in the following transcript(s): HUMICAMA1A_PEA_{—}1_T2 (SEQ ID NO:279), HUMICAMA1A_PEA_{—}1_T4 (SEQ ID NO:280), HUMICAMA1A_PEA_{—}1_T5 (SEQ ID NO:281), HUMICAMA1A_PEA_{—}1_T8 (SEQ ID NO:282), HUMICAMA1A_PEA_{—}1_T12 (SEQ ID NO:283) and HUMICAMA1A_PEA_{—}1_T16 (SEQ ID NO:284). Table 34 below describes the starting and ending position of this segment on each transcript.

TABLE 34
Segment location on transcripts

| | Segment | |
|---|---|---|
| | starting | Segment |
| Transcript name | position | ending position |
| HUMICAMA1A_PEA_1_T2 (SEQ ID | 2458 | 2478 |
| NO: 279) | | |
| HUMICAMA1A_PEA_1_T4 (SEQ ID | 2622 | 2642 |
| NO: 280) | | |
| HUMICAMA1A_PEA_1_T5 (SEQ ID | 2376 | 2396 |
| NO: 281) | | |
| HUMICAMA1A_PEA_1_T8 (SEQ ID | 2112 | 2132 |
| NO: 282) | | |
| HUMICAMA1A_PEA_1_T12 (SEQ | 2376 | 2396 |
| ID NO: 283) | | |
| HUMICAMA1A_PEA_1_T16 (SEQ | 2376 | 2396 |
| ID NO: 284) | | |

[1054] Segment cluster HUMICAMA1A_PEA_{—}1_node_{—}18 (SEQ ID NO:301) according to the present invention is supported by 57 libraries. The number of libraries was determined as previously described. This segment can be found in the following transcript(s): HUMICAMA1A_PEA_{—}1_T2 (SEQ ID NO:279), HUMICAMA1A_PEA_{—}1_T4 (SEQ ID NO:280), HUMICAMA1A_PEA_{—}1_T5 (SEQ ID NO:281), HUMICAMA1A_PEA_{—}1_T8 (SEQ ID NO:282), HUMICAMA1A_PEA_{—}1_T12 (SEQ ID NO:283) and HUMICAMA1A_PEA_{—}1_T16 (SEQ ID NO:284). Table 35 below describes the starting and ending position of this segment on each transcript.

TABLE 35
Segment location on transcripts

| | Segment | |
|---|---|---|
| | starting | Segment |
| Transcript name | position | ending position |
| HUMICAMA1A_PEA_1_T2 (SEQ ID | 2479 | 2568 |
| NO: 279) | | |
| HUMICAMA1A_PEA_1_T4 (SEQ ID | 2643 | 2732 |
| NO: 280) | | |
| HUMICAMA1A_PEA_1_T5 (SEQ ID | 2397 | 2486 |
| NO: 281) | | |
| HUMICAMA1A_PEA_1_T8 (SEQ ID | 2133 | 2222 |
| NO: 282) | | |
| HUMICAMA1A_PEA_1_T12 (SEQ | 2397 | 2486 |
| ID NO: 283) | | |
| HUMICAMA1A_PEA_1_T16 (SEQ | 2397 | 2486 |
| ID NO: 284) | | |

[1055] Segment cluster HUMICAMA1A_PEA_{—}1_node_{—}19 (SEQ ID NO:302) according to the present invention can be found in the following transcript(s): HUMICAMA1A_PEA_{—}1_T2 (SEQ ID NO:279), HUMICAMA1A_PEA_{—}1_T4 (SEQ ID NO:280), HUMICAMA1A_PEA_{—}1_T5 (SEQ ID NO:281), HUMICAMA1A_PEA_{—}1_T8 (SEQ ID NO:282), HUMICAMA1A_PEA_{—}1_T12 (SEQ ID NO:283) and HUMICAMA1A_PEA_{—}1_T16 (SEQ ID NO:284). Table 36 below describes the starting and ending position of this segment on each transcript.

TABLE 36
Segment location on transcripts

| | Segment | |
|---|---|---|
| | starting | Segment |
| Transcript name | position | ending position |
| HUMICAMA1A_PEA_1_T2 (SEQ ID | 2569 | 2593 |
| NO: 279) | | |
| HUMICAMA1A_PEA_1_T4 (SEQ ID | 2733 | 2757 |
| NO: 280) | | |
| HUMICAMA1A_PEA_1_T5 (SEQ ID | 2487 | 2511 |
| NO: 281) | | |
| HUMICAMA1A_PEA_1_T8 (SEQ ID | 2223 | 2247 |
| NO: 282) | | |
| HUMICAMA1A_PEA_1_T12 (SEQ | 2487 | 2511 |
| ID NO: 283) | | |
| HUMICAMA1A_PEA_1_T16 (SEQ | 2487 | 2511 |
| ID NO: 284) | | |

[1056] Segment cluster HUMICAMA1A_PEA_node_{—}22 (SEQ ID NO:303) according to the present invention can be found in the following transcript(s): HUMICAMA1A_PEA_{—}1_T2 (SEQ ID NO:279), HUMICAMA1A_PEA_{—}1_T4 (SEQ ID NO:280), HUMICAMA1A_PEA_{—}1_T5 (SEQ ID NO:281), HUMICAMA1A_PEA_{—}1_T8 (SEQ ID NO:282), HUMICAMA1A_PEA_{—}1_T12 (SEQ ID NO:283) and HUMICAMA1A_PEA_{—}1_T16 (SEQ ID NO:284). Table 37 below describes the starting and ending position of this segment on each transcript.

TABLE 37
Segment location on transcripts

| | Segment | |
|---|---|---|
| | starting | Segment |
| Transcript name | position | ending position |
| HUMICAMA1A_PEA_1_T2 (SEQ ID | 2821 | 2839 |
| NO: 279) | | |
| HUMICAMA1A_PEA_1_T4 (SEQ ID | 2985 | 3003 |
| NO: 280) | | |
| HUMICAMA1A_PEA_1_T5 (SEQ ID | 2864 | 2882 |
| NO: 281) | | |
| HUMICAMA1A_PEA_1_T8 (SEQ ID | 2475 | 2493 |
| NO: 282) | | |
| HUMICAMA1A_PEA_1_T12 (SEQ | 2864 | 2882 |
| ID NO: 283) | | |
| HUMICAMA1A_PEA_1_T16 (SEQ | 2864 | 2882 |
| ID NO: 284) | | |

[1057] Segment cluster HUMICAMA1A_PEA_{—}1_node_{—}23 (SEQ ID NO:304) according to the present invention is supported by 5 libraries. The number of libraries was determined as previously described. This segment can be found in the following transcript(s): HUMICAMA1A_PEA_{—}1_T12 (SEQ ID NO:283) and HUMICAMA1A_PEA_{—}1_T16 (SEQ ID NO:284). Table 38 below describes the starting and ending position of this segment on each transcript.

TABLE 38
Segment location on transcripts

| | Segment | |
|---|---|---|
| | starting | Segment |
| Transcript name | position | ending position |
| HUMICAMA1A_PEA_1_T12 (SEQ | 2883 | 2968 |
| ID NO: 283) | | |
| HUMICAMA1A_PEA_1_T16 (SEQ | 2883 | 2968 |
| ID NO: 284) | | |

[1058] Segment cluster HUMICAMA1A_PEA_{—}1_node_{—}26 (SEQ ID NO:305) according to the present invention can be found in the following transcript(s): HUMICAMA1A_PEA_{—}1_T2 (SEQ ID NO:279), HUMICAMA1A_PEA_{—}1_T4 (SEQ ID NO:280), HUMICAMA1A_PEA_{—}1_T5 (SEQ ID NO:281), HUMICAMA1A_PEA_{—}1_T8 (SEQ ID NO:282) and HUMICAMA1A_PEA_{—}1_T12 (SEQ ID NO:283). Table 39 below describes the starting and ending position of this segment on each transcript.

TABLE 39
Segment location on transcripts

| | Segment | |
|---|---|---|
| | starting | Segment |
| Transcript name | position | ending position |
| HUMICAMA1A_PEA_1_T2 (SEQ ID | 3119 | 3137 |
| NO: 279) | | |
| HUMICAMA1A_PEA_1_T4 (SEQ ID | 3283 | 3301 |
| NO: 280) | | |
| HUMICAMA1A_PEA_1_T5 (SEQ ID | 3162 | 3180 |
| NO: 281) | | |
| HUMICAMA1A_PEA_1_T8 (SEQ ID | 2773 | 2791 |
| NO: 282) | | |
| HUMICAMA1A_PEA_1_T12 (SEQ | 3248 | 3266 |
| ID NO: 283) | | |

[1059] Segment cluster HUMICAMA1A_PEA_{—}1_node_{—}28 (SEQ ID NO:306) according to the present invention can be found in the following transcript(s): HUMICAMA1A_PEA_{—}1_T2 (SEQ ID NO:279), HUMICAMA1A_PEA_T4 (SEQ ID NO:280), HUMICAMA1A_PEA_{—}1_T5 (SEQ ID NO:281), HUMICAMA1A_PEA_{—}1_T8 (SEQ ID NO:282) and HUMICAMA1A_PEA_{—}1_T12 (SEQ ID NO:283). Table 40 below describes the starting and ending position of this segment on each transcript.

TABLE 40
Segment location on transcripts

| | Segment | |
|---|---|---|
| | starting | Segment |
| Transcript name | position | ending position |
| HUMICAMA1A_PEA_1_T2 (SEQ ID | 4205 | 4208 |
| NO: 279) | | |
| HUMICAMA1A_PEA_1_T4 (SEQ ID | 4369 | 4372 |
| NO: 280) | | |
| HUMICAMA1A_PEA_1_T5 (SEQ ID | 4248 | 4251 |
| NO: 281) | | |
| HUMICAMA1A_PEA_1_T8 (SEQ ID | 3859 | 3862 |
| NO: 282) | | |
| HUMICAMA1A_PEA_1_T12 (SEQ | 4334 | 4337 |
| ID NO: 283) | | |

[1060] Variant protein alignment to the previously known protein:

| Sequence name: ICA1_HUMAN (SEQ ID NO:307) | | | |
|---|---|---|---|
| Sequence documentation: | | | |
| Alignment of: HUMICAMA1A_PEA_1_P2 (SEQ ID NO:309) × | | | |
| ICA1_HUMAN (SEQ ID NO:307) . . | | | |
| Alignment segment 1/1: | | | |
| Quality: | 2994.00 | Escore: | 0 |
| Matching length: | 309 | Total length: | 309 |
| Matching Percent | 100.00 | Matching Percent | 100.00 |
| Similarity: | | Identity: | |
| Total Percent | 100.00 | Total Percent | 100.00 |
| Similarity: | | Identity: | |
| Gaps: | 0 | | |

| Alignment: | | |
|---|---|---|
| | . . . . . | |
| 1 | MAPSSPRPALPALLVLLGALFPGPGNAQTSVSPSKVILPRGGSVLVTCST | 50 |
| | \|\|\|\|\|\|\|\|\|\|\|\|\|\|\|\|\|\|\|\|\|\|\|\|\|\|\|\|\|\|\|\|\|\|\|\|\|\|\|\|\|\|\|\|\|\|\|\|\|\| | |
| 1 | MAPSSPRPALPALLVLLGALFPGPGNAQTSVSPSKVILPRGGSvLVTCST | 50 |
| | . . . . . | |
| 51 | SCDQPKLLGIETPLPKKELLLPGNNRKVYELSNVQEDSQPMCYSNCPDGQ | 100 |
| | \|\|\|\|\|\|\|\|\|\|\|\|\|\|\|\|\|\|\|\|\|\|\|\|\|\|\|\|\|\|\|\|\|\|\|\|\|\|\|\|\|\|\|\|\|\|\|\|\|\| | |
| 51 | SCDQPKLLGIETPLPKKELLLPGNNRKVYELSNVQEDSQPNCYSNCPDGQ | 100 |
| | . . . . . | |
| 101 | STAKTFLTVYWTPERVELAPLPSWQPVGRNLTLRCQVEGGAPRANLTVVL | 150 |
| | \|\|\|\|\|\|\|\|\|\|\|\|\|\|\|\|\|\|\|\|\|\|\|\|\|\|\|\|\|\|\|\|\|\|\|\|\|\|\|\|\|\|\|\|\|\|\|\|\|\| | |
| 101 | STAKTFLTVYWTPERVELAPLPSWQPVGKNLTLRCQVEGGAPRANLTVVL | 150 |
| | . . . . . | |
| 151 | LRGEKELKREPAVGEPAEVTTTVLVRRDHHGANFSCRTELDLRPQGLELF | 200 |
| | \|\|\|\|\|\|\|\|\|\|\|\|\|\|\|\|\|\|\|\|\|\|\|\|\|\|\|\|\|\|\|\|\|\|\|\|\|\|\|\|\|\|\|\|\|\|\|\|\|\| | |
| 151 | LRGEKELKREPAVGEPAEVTTTVLVRRDHHGANFSCRTELDLRPQGLELF | 200 |
| | . . . . . | |
| 201 | ENTSAPYQLQTFVLPATPPQLVSPRVLEVDTQGTVVCSLDGLFPVSEAQV | 250 |
| | \|\|\|\|\|\|\|\|\|\|\|\|\|\|\|\|\|\|\|\|\|\|\|\|\|\|\|\|\|\|\|\|\|\|\|\|\|\|\|\|\|\|\|\|\|\|\|\|\|\| | |
| 201 | ENTSAPYQLQTFVLPATPPQLVSPRVLEVDTQGTVVCSLDGLFPVSEAQV | 250 |
| | . . . . . | |
| 251 | HLALGDQRLNPTVTYGNDSFSAKASVSVTAEDEGTQRLTCAVILGNQSQE | 300 |
| | \|\|\|\|\|\|\|\|\|\|\|\|\|\|\|\|\|\|\|\|\|\|\|\|\|\|\|\|\|\|\|\|\|\|\|\|\|\|\|\|\|\|\|\|\|\|\|\|\|\| | |
| 251 | HLALGDQRLNPTVTYGNDSFSAKASVSVTAEDEGTQRLTCAVILGNQSQE | 300 |
| 301 | TLQTVTIYS | 309 |
| | \|\|\|\|\|\|\|\|\| | |
| 301 | TLQTVTIYS | 309 |

| Sequence name: ICA1_HUMAN (SEQ ID NO:307) | | | |
|---|---|---|---|
| Sequence documentation: | | | |
| Alignment of: HUMICAMA1A_PEA_1_P5 (SEQ ID NO:310) × | | | |
| ICA1_HUMAN (SEQ ID NO:307) . . | | | |
| Alignment segment 1/1: | | | |
| Quality: | 3802.00 | Escore: | 0 |
| Matching length: | 393 | Total length: | 393 |
| Matching Percent | 100.00 | Matching Percent | 100.00 |
| Similarity: | | Identity: | |
| Total Percent | 100.00 | Total Percent | 100.00 |
| Similarity: | | Identity: | |
| Gaps: | 0 | | |

| Alignment: | | |
|---|---|---|
| | . . . . . | |
| 1 | MAPSSPRPALPALLVLLGALFPGPGNAQTSVSPSKVILPRGGSVLVTCST | 50 |
| | \|\|\|\|\|\|\|\|\|\|\|\|\|\|\|\|\|\|\|\|\|\|\|\|\|\|\|\|\|\|\|\|\|\|\|\|\|\|\|\|\|\|\|\|\|\|\|\|\|\| | |
| 1 | MAPSSPRPALPALLVLLGALFPGPGNAQTSVSPSKVILPRGGSVLVTCST | 50 |
| | . . . . . | |
| 51 | SCDQPKLLGIETPLPKKELLLPGNNRKVYELSNVQEDSQPMCYSNCPDGQ | 100 |
| | \|\|\|\|\|\|\|\|\|\|\|\|\|\|\|\|\|\|\|\|\|\|\|\|\|\|\|\|\|\|\|\|\|\|\|\|\|\|\|\|\|\|\|\|\|\|\|\|\|\| | |
| 51 | SCDQPKLLGIETPLPKKELLLPGNNRKVYELSNVQEDSQPMCYSNCPDGQ | 100 |
| | . . . . . | |
| 101 | STAKTFLTVYWTPERVELAPLPSWQPVGKNLTLRCQVEGGAPRANLTVVL | 150 |
| | \|\|\|\|\|\|\|\|\|\|\|\|\|\|\|\|\|\|\|\|\|\|\|\|\|\|\|\|\|\|\|\|\|\|\|\|\|\|\|\|\|\|\|\|\|\|\|\|\|\| | |
| 101 | STAKTFLTVYWTPERVELAPLPSWQPVGKNLTLRCQVEGGAPRANLTVVL | 150 |
| | . . . . . | |
| 151 | LRGEKELKREPAVGEPAEVTTTVLVRRDHHGANFSCRTELDLRPQGLELF | 200 |
| | \|\|\|\|\|\|\|\|\|\|\|\|\|\|\|\|\|\|\|\|\|\|\|\|\|\|\|\|\|\|\|\|\|\|\|\|\|\|\|\|\|\|\|\|\|\|\|\|\|\| | |
| 151 | LRGEKELKREPAVGEPAEVTTTVLVRRDHHGANFSCRTELDLRPQGLELF | 200 |
| | . . . . . | |
| 201 | ENTSAPYQLQTFVLPATPPQLVSPRVLEVDTQGTVVCSLDGLFPVSEAQV | 250 |
| | \|\|\|\|\|\|\|\|\|\|\|\|\|\|\|\|\|\|\|\|\|\|\|\|\|\|\|\|\|\|\|\|\|\|\|\|\|\|\|\|\|\|\|\|\|\|\|\|\|\| | |
| 201 | ENTSAPYQLQTFVLPATPPQLVSPRVLEVDTQGTVVCSLDGLFPVSEAQV | 250 |
| | . . . . . | |
| 251 | HLALGDQRLNPTVTYGNDSFSAKASVSVTAEDEGTQRLTCAVILGNQSQE | 300 |
| | \|\|\|\|\|\|\|\|\|\|\|\|\|\|\|\|\|\|\|\|\|\|\|\|\|\|\|\|\|\|\|\|\|\|\|\|\|\|\|\|\|\|\|\|\|\|\|\|\|\| | |
| 251 | HLALGDQRLNPTVTYGNDSFSAKASVSVTAEDEGTQRLTCAVILGNQSQE | 300 |
| | . . . . . | |
| 301 | TLQTVTIYSFPAPNVILTKPEVSEGTEVTVKCEAHPRAKVTLNGVPAQPL | 350 |
| | \|\|\|\|\|\|\|\|\|\|\|\|\|\|\|\|\|\|\|\|\|\|\|\|\|\|\|\|\|\|\|\|\|\|\|\|\|\|\|\|\|\|\|\|\|\|\|\|\|\| | |
| 301 | TLQTVTIYSFPAPNVILTKPEVSEGTEVTVKCEAHPRAKVTLNGVPAQPL | 350 |
| | . . . . | |
| 351 | GPRAQLLLKATPEDNGRSFSCSATLEVAGQLIHKNQTRELRVL | 393 |
| | \|\|\|\|\|\|\|\|\|\|\|\|\|\|\|\|\|\|\|\|\|\|\|\|\|\|\|\|\|\|\|\|\|\|\|\|\|\|\|\|\|\|\| | |
| 351 | GPRAQLLLKATPEDNGRSFSCSATLEVAGQLIHKNQTRELRVL | 393 |

| Sequence name: ICA1_HUMAN_V1 (SEQ ID NO:308) | | | |
|---|---|---|---|
| Sequence documentation: | | | |
| Alignment of: HUMICAMA1A_PEA_1_P8 (SEQ ID NO:311) × | | | |
| ICA1_HUMAN_V1 (SEQ ID NO:308) . . | | | |
| Alignment segment 1/1: | | | |
| Quality: | 4214.00 | Escore: | 0 |
| Matching length: | 444 | Total length: | 532 |
| Matching Percent | 100.00 | Matching Percent | 100.00 |
| Similarity: | | Identity: | |
| Total Percent | 83.46 | Total Percent | 83.46 |
| Similarity: | | Identity: | |
| Gaps: | 1 | | |

| Alignment: | | |
|---|---|---|
| | . . . . . | |
| 1 | MAPSSPRPALPALLVLLGALFPG........................... | 23 |
| | \|\|\|\|\|\|\|\|\|\|\|\|\|\|\|\|\|\|\|\|\|\| | |
| 1 | MAPSSPRPALPALLVLLGALFPGPGNAQTSVSPSKVILPRGGSVLVTCST | 50 |
| | . . . . . | |
| 23 | .................................................. | 23 |
| 51 | SCDQPKLLGIETPLPKKELLLPGNNRKVYELSNVQEDSQPMCYSNCPDGQ | 100 |
| | . . . . . | |
| 24 | ...........TPERVELAPLPSWQPVGKNLTLRCQVEGGAPRANLTVVL | 62 |
| | \|\|\|\|\|\|\|\|\|\|\|\|\|\|\|\|\|\|\|\|\|\|\|\|\|\|\|\|\|\|\|\|\|\|\|\|\|\|\| | |
| 101 | STAKTFLTVYWTPERVELAPLPSWQPVGKNLTLRCQVEGGAPRANLTVVL | 150 |
| | . . . . . | |
| 63 | LRGEKELKREPAVGEPAEVTTTVLVRRDHHGANFSCRTELDLRPQGLELF | 112 |
| | \|\|\|\|\|\|\|\|\|\|\|\|\|\|\|\|\|\|\|\|\|\|\|\|\|\|\|\|\|\|\|\|\|\|\|\|\|\|\|\|\|\|\|\|\|\|\|\|\|\| | |
| 151 | LRGEKELKREPAVGEPAEVTTTVLVRRDHHGANFSCRTELDLRPQGLELF | 200 |
| | . . . . . | |
| 113 | ENTSAPYQLQTFVLPATPPQLVSPRVLEVDTQGTVVCSLDGLFPVSEAQV | 162 |
| | \|\|\|\|\|\|\|\|\|\|\|\|\|\|\|\|\|\|\|\|\|\|\|\|\|\|\|\|\|\|\|\|\|\|\|\|\|\|\|\|\|\|\|\|\|\|\|\|\|\| | |
| 201 | ENTSAPYQLQTFVLPATPPQLVSPRVLEVDTQGTVVCSLDGLFPVSEAQV | 250 |
| | . . . . . | |
| 163 | HLALGDQRLNPTVTYGNDSFSAKASVSVTAEDEGTQRLTCAVILGNQSQE | 212 |
| | \|\|\|\|\|\|\|\|\|\|\|\|\|\|\|\|\|\|\|\|\|\|\|\|\|\|\|\|\|\|\|\|\|\|\|\|\|\|\|\|\|\|\|\|\|\|\|\|\|\| | |
| 251 | HLALGDQRLNPTVTYGNDSFSAKASVSVTAEDEGTQRLTCAVILGNQSQE | 300 |
| | . . . . . | |
| 213 | TLQTVTIYSFPAPNVILTKPEVSEGTEVTVKCEAHPRAKVTLNGVPAQPL | 262 |
| | \|\|\|\|\|\|\|\|\|\|\|\|\|\|\|\|\|\|\|\|\|\|\|\|\|\|\|\|\|\|\|\|\|\|\|\|\|\|\|\|\|\|\|\|\|\|\|\|\|\| | |
| 301 | TLQTVTIYSFPAPNVILTKPEVSEGTEVTVKCEAHPRAKVTLNGVPAQPL | 350 |
| | . . . . . | |
| 263 | GPRAQLLLKATPEDNGRSFSCSATLEVAGQLIHKNQTRELRVLYGPRLDE | 312 |
| | \|\|\|\|\|\|\|\|\|\|\|\|\|\|\|\|\|\|\|\|\|\|\|\|\|\|\|\|\|\|\|\|\|\|\|\|\|\|\|\|\|\|\|\|\|\|\|\|\|\| | |
| 351 | GPRAQLLLKATPEDNGRSFSCSATLEVAGQLIHKNQTRELRVLYGPRLDE | 400 |
| | . . . . . | |
| 313 | RDCPGNWTWPENSQQTPMCQAWGNPLPELKCLKDGTFPLPIGESVTVTRD | 362 |
| | \|\|\|\|\|\|\|\|\|\|\|\|\|\|\|\|\|\|\|\|\|\|\|\|\|\|\|\|\|\|\|\|\|\|\|\|\|\|\|\|\|\|\|\|\|\|\|\|\|\| | |
| 401 | RDCPGNWTWPENSQQTPMCQAWGNPLPELKCLKDGTFPLPIGESVTVTRD | 450 |
| | . . . . . | |
| 363 | LEGTYLCRARSTQGEVTRKVTVNVLSPRYEIVIITVVAAAVIMGTAGLST | 412 |
| | \|\|\|\|\|\|\|\|\|\|\|\|\|\|\|\|\|\|\|\|\|\|\|\|\|\|\|\|\|\|\|\|\|\|\|\|\|\|\|\|\|\|\|\|\|\|\|\|\|\| | |
| 451 | LEGTYLCRARSTQGEVTRKVTVNVLSPRYEIVIITVVAAAVIMGTAGLST | 500 |
| | . . . | |
| 413 | YLYNRQRKIKKYRLQQAQKGTPMKPNTQATPP | 444 |
| | \|\|\|\|\|\|\|\|\|\|\|\|\|\|\|\|\|\|\|\|\|\|\|\|\|\|\|\|\|\|\|\| | |
| 501 | YLYNRQRKIKKYRLQQAQKGTPMKPNTQATPP | 532 |

| Sequence name: ICA1_HUMAN (SEQ ID NO:307) | | | |
|---|---|---|---|
| Sequence documentation: | | | |
| Alignment of: HUMICAMA1A_PEA_1_P15 (SEQ ID NO:312) × | | | |
| ICA1_HUMAN (SEQ ID NO:307) . . | | | |
| Alignment segment 1/1: | | | |
| Quality: | 2076.00 | Escore: | 0 |
| Matching length: | 212 | Total length: | 212 |
| Matching Percent | 100.00 | Matching Percent | 100.00 |
| Similarity: | | Identity: | |
| Total Percent | 100.00 | Total Percent | 100.00 |
| Similarity: | | Identity: | |
| Gaps: | 0 | | |

| Alignment: | | |
|---|---|---|
| | . . . . . | |
| 1 | MAPSSPRPALPALLVLLGALFPGPGNAQTSVSPSKVILPRGGSVLVTCST | 50 |
| | \|\|\|\|\|\|\|\|\|\|\|\|\|\|\|\|\|\|\|\|\|\|\|\|\|\|\|\|\|\|\|\|\|\|\|\|\|\|\|\|\|\|\|\|\|\|\|\|\|\| | |
| 1 | MAPSSPRPALPALLVLLGALFPGPGNAQTSVSPSKVILPRGGSVLVTCST | 50 |
| | . . . . . | |
| 51 | SCDQPKLLGIETPLPKKELLLPGNNRKVYELSNVQEDSQPMCYSNCPDGQ | 100 |
| | \|\|\|\|\|\|\|\|\|\|\|\|\|\|\|\|\|\|\|\|\|\|\|\|\|\|\|\|\|\|\|\|\|\|\|\|\|\|\|\|\|\|\|\|\|\|\|\|\|\| | |
| 51 | SCDQPKLLGIETPLPKKELLLPGNNRKVYELSNVQEDSQPMCYSNCPDGQ | 100 |
| | . . . . . | |
| 101 | STAKTFLTVYWTPERVELAPLPSWQPVGKNLTLRCQVEGGAPRANLTVVL | 150 |
| | \|\|\|\|\|\|\|\|\|\|\|\|\|\|\|\|\|\|\|\|\|\|\|\|\|\|\|\|\|\|\|\|\|\|\|\|\|\|\|\|\|\|\|\|\|\|\|\|\|\| | |
| 101 | STAKTFLTVYWTPERVELAPLPSWQFVGKNLTLRCQVEGGAPRANLTVVL | 150 |
| | . . . . . | |
| 151 | LRGEKELKREPAVGEPAEVTTTVLVRRDHHGANFSCRTELDLRPQGLELF | 200 |
| | \|\|\|\|\|\|\|\|\|\|\|\|\|\|\|\|\|\|\|\|\|\|\|\|\|\|\|\|\|\|\|\|\|\|\|\|\|\|\|\|\|\|\|\|\|\|\|\|\|\| | |
| 151 | LRGEKELKREPAVGEPAEVTTTVLVRRDHHGANFSCRTELDLRPQGLELF | 200 |
| | . | |
| 201 | ENTSAPYQLQTF | 212 |
| | \|\|\|\|\|\|\|\|\|\|\|\| | |
| 201 | ENTSAPYQLQTF | 212 |

### Description for Cluster HUMLYSYL

[1061] Cluster HUMLYSYL features 10 transcript(s) and 44 segment(s) of interest, the names for which are given in Tables 1 and 2, respectively, the sequences themselves are given at the end of the application. The selected protein variants are given in table 3.

TABLE 1
Transcripts of interest

| Transcript Name | Sequence ID No. |
|---|---|
| HUMLYSYL_PEA_1_T2 | 313 |
| HUMLYSYL_PEA_1_T4 | 314 |
| HUMLYSYL_PEA_1_T5 | 315 |
| HUMLYSYL_PEA_1_T6 | 316 |
| HUMLYSYL_PEA_1_T8 | 317 |
| HUMLYSYL_PEA_1_T9 | 318 |
| HUMLYSYL_PEA_1_T19 | 319 |
| HUMLYSYL_PEA_1_T20 | 320 |
| HUMLYSYL_PEA_1_T22 | 321 |
| HUMLYSYL_PEA_1_T24 | 322 |

[1062] TABLE 2
Segments of interest

| Segment Name | Sequence ID No. |
|---|---|
| HUMLYSYL_PEA_1_node_6 | 323 |
| HUMLYSYL_PEA_1_node_14 | 324 |
| HUMLYSYL_PEA_1_node_19 | 325 |
| HUMLYSYL_PEA_1_node_38 | 326 |
| HUMLYSYL_PEA_1_node_55 | 327 |
| HUMLYSYL_PEA_1_node_59 | 328 |
| HUMLYSYL_PEA_1_node_61 | 329 |
| HUMLYSYL_PEA_1_node_62 | 330 |
| HUMLYSYL_PEA_1_node_65 | 331 |
| HUMLYSYL_PEA_1_node_71 | 332 |
| HUMLYSYL_PEA_1_node_72 | 333 |
| HUMLYSYL_PEA_1_node_3 | 334 |
| HUMLYSYL_PEA_1_node_4 | 335 |
| HUMLYSYL_PEA_1_node_8 | 336 |
| HUMLYSYL_PEA_1_node_10 | 337 |
| HUMLYSYL_PEA_1_node_11 | 338 |
| HUMLYSYL_PEA_1_node_12 | 339 |
| HUMLYSYL_PEA_1_node_16 | 340 |
| HUMLYSYL_PEA_1_node_20 | 341 |
| HUMLYSYL_PEA_1_node_23 | 342 |
| HUMLYSYL_PEA_1_node_25 | 343 |
| HUMLYSYL_PEA_1_node_28 | 344 |
| HUMLYSYL_PEA_1_node_30 | 345 |
| HUMLYSYL_PEA_1_node_31 | 346 |
| HUMLYSYL_PEA_1_node_33 | 347 |
| HUMLYSYL_PEA_1_node_34 | 348 |
| HUMLYSYL_PEA_1_node_36 | 349 |
| HUMLYSYL_PEA_1_node_40 | 350 |
| HUMLYSYL_PEA_1_node_41 | 351 |
| HUMLYSYL_PEA_1_node_42 | 352 |
| HUMLYSYL_PEA_1_node_44 | 353 |
| HUMLYSYL_PEA_1_node_45 | 354 |
| HUMLYSYL_PEA_1_node_46 | 355 |
| HUMLYSYL_PEA_1_node_48 | 356 |
| HUMLYSYL_PEA_1_node_49 | 357 |
| HUMLYSYL_PEA_1_node_52 | 358 |
| HUMLYSYL_PEA_1_node_53 | 359 |
| HUMLYSYL_PEA_1_node_56 | 360 |
| HUMLYSYL_PEA_1_node_63 | 361 |
| HUMLYSYL_PEA_1_node_64 | 362 |
| HUMLYSYL_PEA_1_node_66 | 363 |
| HUMLYSYL_PEA_1_node_67 | 364 |
| HUMLYSYL_PEA_1_node_68 | 365 |
| HUMLYSYL_PEA_1_node_70 | 366 |

[1063] TABLE 3
Proteins of interest

| | Sequence | |
|---|---|---|
| Protein Name | ID No. | Corresponding Transcript(s) |
| HUMLYSYL_PEA_1_P2 | 369 | HUMLYSYL_PEA_1_T2 |
| | | (SEQ ID NO: 313) |
| HUMLYSYL_PEA_1_P4 | 370 | HUMLYSYL_PEA_1_T4 |
| | | (SEQ ID NO: 314) |
| HUMLYSYL_PEA_1_P5 | 371 | HUMLYSYL_PEA_1_T5 |
| | | (SEQ ID NO: 315) |
| HUMLYSYL_PEA_1_P6 | 372 | HUMLYSYL_PEA_1_T6 |
| | | (SEQ ID NO: 316) |
| HUMLYSYL_PEA_1_P7 | 373 | HUMLYSYL_PEA_1_T9 |
| | | (SEQ ID NO: 318) |
| HUMLYSYL_PEA_1_P13 | 374 | HUMLYSYL_PEA_1_T19 |
| | | (SEQ ID NO: 319) |
| HUMLYSYL_PEA_1_P14 | 375 | HUMLYSYL_PEA_1_T20 |
| | | (SEQ ID NO: 320) |
| HUMLYSYL_PEA_1_P16 | 376 | HUMLYSYL_PEA_1_T22 |
| | | (SEQ ID NO: 321) |
| HUMLYSYL_PEA_1_P18 | 377 | HUMLYSYL_PEA_1_T24 |
| | | (SEQ ID NO: 322) |
| HUMLYSYL_PEA_1_P24 | 378 | HUMLYSYL_PEA_1_T8 |
| | | (SEQ ID NO: 317) |

[1064] These sequences are variants of the known protein Procollagen-lysine,2-oxoglutarate 5-dioxygenase 1 precursor (SEQ ID NO:367) (SwissProt accession identifier PLO1_HUMAN; known also according to the synonyms EC 1.14.11.4; Lysyl hydroxylase 1; LH1), referred to herein as the previously known protein.

[1065] Protein Procollagen-lysine,2-oxoglutarate 5-dioxygenase 1 precursor (SEQ ID NO:367) is known or believed to have the following function(s): forms hydroxylysine residues in -Xaa-Lys-Gly- sequences in collagens. These hydroxylysines serve as sites of attachment for carbohydrate units and are essential for the stability of the intermolecular collagen crosslinks. The sequence for protein Procollagen-lysine,2-oxoglutarate 5-dioxygenase 1 precursor is given at the end of the application, as “Procollagen-lysine,2-oxoglutarate 5-dioxygenase 1 precursor amino acid sequence” (SEQ ID NO:367). Known polymorphisms for this sequence are as shown in Table 4.

TABLE 4
Amino acid mutations for Known Protein

| SNP position(s) on | |
|---|---|
| amino acid sequence | Comment |
| 99 | T -> A. /FTId = VAR_014220. |
| 367-371 | Missing (in EDS-VI). /FTId = VAR_009269. |
| 532 | Missing (in EDS-VI). /FTId = VAR_006354. |
| 612 | W -> C (in EDS-VI). /FTId = VAR_006355. |
| 678 | G -> R (in EDS-VI). /FTId = VAR_006356. |
| 120 | A -> S |

[1066] Protein Procollagen-lysine,2-oxoglutarate 5-dioxygenase 1 precursor localization is believed to be Membrane bound in cisternae of rough endoplasmic reticulum.

[1067] The known protein was shown to be related to endometriosis (Yang et al, Best Pract Res Clin Obstet Gynaecol. 2004 April; 18(2):305-18). Variants of this cluster are suitable as diagnostic markers for endometriosis.

[1068] The following GO Annotation(s) apply to the previously known protein. The following annotation(s) were found: protein modification; epidermal differentiation, which are annotation(s) related to Biological Process; electron transporter; procollagen-lysine 5-dioxygenase; oxidoreductase; oxidoreductase, acting on single donors with incorporation of molecular oxygen, incorporation of two atoms of oxygen, which are annotation(s) related to Molecular Function; and endoplasmic reticulum; membrane, which are annotation(s) related to Cellular Component.

[1069] The GO assignment relies on information from one or more of the SwissProt/TremBl Protein knowledgebase, available from <http://www.expasy.ch/sprot/>; or Locuslink, available from <http://www.ncbi.nlm.nih.gov/projects/LocusLink/>.

[1070] As noted above, cluster HUMLYSYL features 10 transcript(s), which were listed in Table 1 above. These transcript(s) encode for protein(s) which are variant(s) of protein Procollagen-lysine,2-oxoglutarate 5-dioxygenase 1 precursor (SEQ ID NO:367). A description of each variant protein according to the present invention is now provided.

[1071] Variant protein HUMLYSYL_PEA_{—}1_P2 (SEQ ID NO:369) according to the present invention has an amino acid sequence as given at the end of the application; it is encoded by transcript(s) HUMLYSYL_PEA_{—}1_T2 (SEQ ID NO:313). An alignment is given to the known protein (Procollagen-lysine,2-oxoglutarate 5-dioxygenase 1 precursor (SEQ ID NO:367)) at the end of the application. One or more alignments to one or more previously published protein sequences are given at the end of the application. A brief description of the relationship of the variant protein according to the present invention to each such aligned protein is as follows:

[1072] Comparison report between HUMLYSYL_PEA_{—}1_P2 (SEQ ID NO:369) and PLO1_HUMAN-V1 (SEQ ID NO:368):

[1073] 1. An isolated chimeric polypeptide encoding for HUMLYSYL_PEA_{—}1_P2 (SEQ ID NO:369), comprising a first amino acid sequence being at least 90% homologous to MRPLLLLALLGWLLLAEAKGDAKPEDNLLVLTVATKETEGFRRFKRSAQFFNYKIQAL GLGEDWNVEKGTSAGGGQKVRLLKKALEKHADKEDLVILFADSYDVLFASGPRELLK KFRQARSQVVFSAEELIYPDRRLETKYPVVSDGKRFLGSGGFIGYAPNLSKLVAEWEGQ DSDSDQLFYTKIFLDPEKREQINITLDHRCRIFQNLDGALDEVVLKFEMGHVRARNLAY DTLPVLIHGNGPTKLQLNYLGNYIPRFWTFETGCTVCDEGLRSLKGIGDEALPTVLVGV FIEQPTPFVSLFFQRLLRLHYPQKHMRLFIHNHEQHHKAQVEEFLAQHGSEYQSVKLVG PEVRMANADARNMGADLCRQDRSCTYYFSVDADVALTEPNSLRLLIQQNKNVIAPLM TRHGRLWSNFWGALSADGYYARSEDYVDIVQGRRVGVWNVPYISNIYLIKGSALRGEL QSSDLFHHSKLDPDMAFCANIRQQ corresponding to amino acids 1-490 of PLO1_HUMAN_V1 (SEQ ID NO:368), which also corresponds to amino acids 1-490 of HUMLYSYL_PEA_{—}1_P2 (SEQ ID NO:369), and a second amino acid sequence being at least 70%, optionally at least 80%, preferably at least 85%, more preferably at least 90% and most preferably at least 95% homologous to a polypeptide having the sequence VSQERAAQDALWMGQAGRMCSCS (SEQ ID NO:474) corresponding to amino acids 491-513 of HUMLYSYL_PEA_{—}1_P2 (SEQ ID NO:369), wherein said first amino acid sequence and second amino acid sequence are contiguous and in a sequential order.

[1074] 2. An isolated polypeptide encoding for a tail of HUMLYSYL_PEA_{—}1_P2 (SEQ ID NO:369), comprising a polypeptide being at least 70%, optionally at least about 80%, preferably at least about 85%, more preferably at least about 90% and most preferably at least about 95% homologous to the sequence VSQERAAQDALWMGQAGRMCSCS (SEQ ID NO:474) in HUMLYSYL_PEA_{—}1_P2 (SEQ ID NO:369).

[1075] It should be noted that the known protein sequence (PLO1_HUMAN (SEQ ID NO:367)) has one or more changes than the sequence given at the end of the application and named as being the amino acid sequence for PLO1_HUMAN_V1 (SEQ ID NO:368). These changes were previously known to occur and are listed in the table below.

TABLE 5
Changes to PLO1_HUMAN_V1 (SEQ ID NO: 368)

| SNP position(s) on | |
|---|---|
| amino acid sequence | Type of change |
| 100 | variant |

[1076] The location of the variant protein was determined according to results from a number of different software programs and analyses, including analyses from SignalP and other specialized programs. The variant protein is believed to be located as follows with regard to the cell: secreted. The protein localization is believed to be secreted because both signal-peptide prediction programs predict that this protein has a signal peptide, and neither trans-membrane region prediction program predicts that this protein has a trans-membrane region.

[1077] Variant protein HUMLYSYL_PEA_{—}1_P2 (SEQ ID NO:369) also has the following non-silent SNPs (Single Nucleotide Polymorphisms) as listed in Table 6, (given according to their position(s) on the amino acid sequence, with the alternative amino acid(s) listed; the last column indicates whether the SNP is known or not; the presence of known SNPs in variant protein HUMLYSYL_PEA_{—}1_P2 (SEQ ID NO:369) Sequence provides support for the deduced sequence of this variant protein according to the present invention).

TABLE 6
Amino acid mutations

| SNP position(s) on amino acid | Alternative | Previously |
|---|---|---|
| sequence | amino acid(s) | known SNP? |
| 67 | E -> D | Yes |
| 98 | F -> | No |
| 99 | A -> T | Yes |
| 120 | A -> S | Yes |
| 178 | S -> | No |
| 179 | D -> N | No |
| 204 | C -> | No |
| 232 | A -> G | No |
| 232 | A -> | No |
| 310 | R -> W | Yes |
| 381 | V -> M | Yes |
| 386 | A -> | No |

[1078] Variant protein HUMLYSYL_PEA_{—}1_P2 (SEQ ID NO:369) is encoded by the following transcript(s): HUMLYSYL_PEA_{—}1_T2 (SEQ ID NO:313), for which the sequence(s) is/are given at the end of the application. The coding portion of transcript HUMLYSYL_PEA_{—}1_T2 (SEQ ID NO:313) is shown in bold; this coding portion starts at position 104 and ends at position 1642. The transcript also has the following SNPs as listed in Table 7 (given according to their position on the nucleotide sequence, with the alternative nucleic acid listed; the last column indicates whether the SNP is known or not; the presence of known SNPs in variant protein HUMLYSYL_PEA_{—}1_P2 (SEQ ID NO:369) Sequence provides support for the deduced sequence of this variant protein according to the present invention).

TABLE 7
Nucleic acid SNPs

| SNP position | | |
|---|---|---|
| on nucleotide | Alternative | Previously |
| sequence | nucleic acid | known SNP? |
| 37 | C -> | No |
| 71 | C -> | No |
| 102 | C -> | No |
| 217 | C -> A | Yes |
| 304 | G -> C | Yes |
| 370 | A -> G | Yes |
| 397 | C -> | No |
| 397 | C -> T | Yes |
| 398 | G -> A | Yes |
| 461 | G -> T | Yes |
| 636 | G -> | No |
| 638 | G -> A | No |
| 715 | C -> | No |
| 798 | C -> | No |
| 798 | C -> G | No |
| 1031 | C -> T | Yes |
| 1244 | G -> A | Yes |
| 1260 | C -> | No |
| 1309 | C -> T | Yes |
| 1489 | G -> C | No |
| 1788 | A -> C | Yes |
| 2057 | G -> | No |
| 2088 | C -> T | Yes |
| 2094 | G -> C | Yes |
| 2118 | G -> T | Yes |
| 2280 | T -> C | Yes |
| 2289 | C -> G | Yes |
| 2300 | G -> | No |
| 2306 | C -> | No |
| 2404 | G -> | No |
| 2411 | C -> G | Yes |
| 2417 | C -> | No |
| 2541 | C -> | No |
| 2541 | C -> T | No |
| 2561 | C -> | No |
| 2598 | G -> A | No |
| 2637 | C -> | No |
| 2637 | C -> G | No |
| 2651 | C -> T | No |
| 2724 | G -> A | No |
| 2724 | G -> C | No |
| 2764 | G -> | No |
| 2771 | C -> T | Yes |
| 2780 | G -> C | Yes |
| 2873 | C -> | No |
| 2887 | G -> C | Yes |
| 2939 | C -> T | Yes |
| 2954 | G -> T | Yes |
| 3010 | C -> A | Yes |

[1079] Variant protein HUMLYSYL_PEA_{—}1_P4 (SEQ ID NO:370) according to the present invention has an amino acid sequence as given at the end of the application; it is encoded by transcript(s) HUMLYSYL_PEA_{—}1_T4 (SEQ ID NO:314). An alignment is given to the known protein (Procollagen-lysine,2-oxoglutarate 5-dioxygenase 1 precursor (SEQ ID NO:367) at the end of the application. One or more alignments to one or more previously published protein sequences are given at the end of the application. A brief description of the relationship of the variant protein according to the present invention to each such aligned protein is as follows:

[1080] Comparison report between HUMLYSYL_PEA_{—}1_P4 (SEQ ID NO:370) and PLO1_HUMAN_V1 (SEQ ID NO:368):

[1081] 1. An isolated chimeric polypeptide encoding for HUMLYSYL_PEA_{—}1_P4 (SEQ ID NO:370), comprising a first amino acid sequence being at least 90% homologous to MRPLLLLALLGWLLLAEAKGDAKPE corresponding to amino acids 1-25 of PLO1_HUMAN_V1 (SEQ ID NO:368), which also corresponds to amino acids 1-25 of HUMLYSYL_PEA_{—}1_P4 (SEQ ID NO:370), a second amino acid sequence being at least 70%, optionally at least 80%, preferably at least 85%, more preferably at least 90% and most preferably at least 95% homologous to a polypeptide having the sequence APCCQEGLRAGGSGSLHLGRDFTVLAGARGSPSPSVSSIPRFWIPGS (SEQ ID NO:504) corresponding to amino acids 26-72 of HUMLYSYL_PEA_{—}1_P4 (SEQ ID NO:370), and a third amino acid sequence being at least 90% homologous to DNLLVLTVATKETEGFRRFKRSAQFFNYKIQALGLGEDWNVEKGTSAGGGQKVRLLK KALEKHADKEDLVILFADSYDVLFASGPRELLKKFRQARSQVVFSAEELIYPDRRLETK YPVVSDGKRFLGSGGFIGYAPNLSKLVAEWEGQDSDSDQLFYTKIFLDPEKREQINITLD HRCRIFQNLDGALDEVVLKFEMGHVRARNLAYDTLPVLIHGNGPTKLQLNYLGNYIPR FWTFETGCTVCDEGLRSLKGIGDEALPTVLVGVFIEQPTPFVSLFFQRLLRLHYPQKHMR LFIHNHEQHHKAQVEEFLAQHGSEYQSVKLVGPEVRMANADARNMGADLCRQDRSCT YYFSVDADVALTEPNSLRLLIQQNKNVIAPLMTRHGRLWSNFWGALSADGYYARSED YVDIVQGRRVGVWNVPYISNIYLIKGSALRGELQS SDLFHHSKLDPDMAFCANIRQQDV FMFLTNRHTLGHLLSLDSYRTTHLHNDLWEVFSNPEDWKEKYIHQNYTKALAGKLVET PCPDVYWFPIFTEVACDELVEEMEHFGQWSLGNNKDNRIQGGYENVPTIDIHMNQIGFE REWHKFLLEYIAPMTEKLYPGYYTRAQFDLAFVVRYKPDEQPSLMPHHDASTFTINIAL NRVGVDYEGGGCRFLRYNCSIRAPRKGWTLMHPGRLTHYHEGLPTTRGTRYIAVSFVD P corresponding to amino acids 26-727 of PLO1_HUMAN_V1 (SEQ ID NO:368), which also corresponds to amino acids 73-774 of HUMLYSYL_PEA_{—}1_P4 (SEQ ID NO:370), wherein said first amino acid sequence, second amino acid sequence and third amino acid sequence are contiguous and in a sequential order.

[1082] 2. An isolated polypeptide encoding for an edge portion of HUMLYSYL_PEA_{—}1_P4 (SEQ ID NO:370), comprising an amino acid sequence being at least 70%, optionally at least about 80%, preferably at least about 85%, more preferably at least about 90% and most preferably at least about 95% homologous to the sequence encoding for APCCQEGLRAGGSGSLHLGRDFTVLAGARGSPSPSVSSIPRFWIPGS (SEQ ID NO:504), corresponding to HUMLYSYL_PEA_{—}1_P4 (SEQ ID NO:370).

[1083] It should be noted that the known protein sequence (PLO1_HUMAN (SEQ ID NO:367)) has one or more changes than the sequence given at the end of the application and named as being the amino acid sequence for PLO1_HUMAN_V1 (SEQ ID NO:368). These changes were previously known to occur and are listed in the table below.

TABLE 8
Changes to PLO1_HUMAN_V1 (SEQ ID NO: 368)

| SNP position(s) on | |
|---|---|
| amino acid sequence | Type of change |
| 100 | variant |

[1084] The location of the variant protein was determined according to results from a number of different software programs and analyses, including analyses from SignalP and other specialized programs. The variant protein is believed to be located as follows with regard to the cell: secreted. The protein localization is believed to be secreted because both signal-peptide prediction programs predict that this protein has a signal peptide, and neither trans-membrane region prediction program predicts that this protein has a trans-membrane region.

[1085] Variant protein HUMLYSYL_PEA_{—}1_P4 (SEQ ID NO:370) also has the following non-silent SNPs (Single Nucleotide Polymorphisms) as listed in Table 9, (given according to their position(s) on the amino acid sequence, with the alternative amino acid(s) listed; the last column indicates whether the SNP is known or not; the presence of known SNPs in variant protein HUMLYSYL_PEA_{—}1_P4 (SEQ ID NO:370) Sequence provides support for the deduced sequence of this variant protein according to the present invention).

TABLE 9
Amino acid mutations

| SNP position(s) | | |
|---|---|---|
| on amino acid | Alternative | Previously |
| sequence | amino acid(s) | known SNP? |
| 114 | E -> D | Yes |
| 145 | F -> | No |
| 146 | A -> T | Yes |
| 167 | A -> S | Yes |
| 225 | S -> | No |
| 226 | D -> N | No |
| 251 | C -> | No |
| 279 | A -> | No |
| 279 | A -> G | No |
| 357 | R -> W | Yes |
| 428 | V -> M | Yes |
| 433 | A -> | No |
| 681 | R -> | No |
| 693 | K -> N | Yes |
| 701 | M -> I | Yes |
| 762 | R -> | No |
| 764 | T -> | No |

[1086] Variant protein HUMLYSYL_PEA_{—}1_P4 (SEQ ID NO:370) is encoded by the following transcript(s): HUMLYSYL_PEA_{—}1_T4 (SEQ ID NO:314), for which the sequence(s) is/are given at the end of the application. The coding portion of transcript HUMLYSYL_PEA_{—}1_T4 (SEQ ID NO:314) is shown in bold; this coding portion starts at position 104 and ends at position 2425. The transcript also has the following SNPs as listed in Table 10 (given according to their position on the nucleotide sequence, with the alternative nucleic acid listed; the last column indicates whether the SNP is known or not; the presence of known SNPs in variant protein HUMLYSYL_PEA_{—}1_P4 (SEQ ID NO:370) Sequence provides support for the deduced sequence of this variant protein according to the present invention).

TABLE 10
Nucleic acid SNPs

| SNP position | | |
|---|---|---|
| on nucleotide | Alternative | Previously |
| sequence | nucleic acid | known SNP? |
| 37 | C -> | No |
| 71 | C -> | No |
| 102 | C -> | No |
| 358 | C -> A | Yes |
| 445 | G -> C | Yes |
| 511 | A -> G | Yes |
| 538 | C -> | No |
| 538 | C -> T | Yes |
| 539 | G -> A | Yes |
| 602 | G -> T | Yes |
| 777 | G -> | No |
| 779 | G -> A | No |
| 856 | C -> | No |
| 939 | C -> | No |
| 939 | C -> G | No |
| 1172 | C -> T | Yes |
| 1385 | G -> A | Yes |
| 1401 | C -> | No |
| 1450 | C -> T | Yes |
| 1630 | G -> C | No |
| 1876 | A -> C | Yes |
| 2145 | G -> | No |
| 2176 | C -> T | Yes |
| 2182 | G -> C | Yes |
| 2206 | G -> T | Yes |
| 2368 | T -> C | Yes |
| 2377 | C -> G | Yes |
| 2388 | G -> | No |
| 2394 | C -> | No |
| 2492 | G -> | No |
| 2499 | C -> G | Yes |
| 2505 | C -> | No |
| 2629 | C -> | No |
| 2629 | C -> T | No |
| 2649 | C -> | No |
| 2686 | G -> A | No |
| 2725 | C -> | No |
| 2725 | C -> G | No |
| 2739 | C -> T | No |
| 2812 | G -> A | No |
| 2812 | G -> C | No |
| 2852 | G -> | No |
| 2859 | C -> T | Yes |
| 2868 | G -> C | Yes |
| 2961 | C -> | No |
| 2975 | G -> C | Yes |
| 3027 | C -> T | Yes |
| 3042 | G -> T | Yes |
| 3098 | C -> A | Yes |

[1087] Variant protein HUMLYSYL_PEA_{—}1_P5 (SEQ ID NO:371) according to the present invention has an amino acid sequence as given at the end of the application; it is encoded by transcript(s) HUMLYSYL_PEA_{—}1_T5 (SEQ ID NO:315). An alignment is given to the known protein (Procollagen-lysine,2-oxoglutarate 5-dioxygenase 1 precursor (SEQ ID NO:367)) at the end of the application. One or more alignments to one or more previously published protein sequences are given at the end of the application. A brief description of the relationship of the variant protein according to the present invention to each such aligned protein is as follows:

[1088] Comparison report between HUMLYSYL_PEA_{—}1_P5 (SEQ ID NO:371) and PLO1_HUMAN_V1 (SEQ ID NO:368):

[1089] 1. An isolated chimeric polypeptide encoding for HUMLYSYL_PEA_{—}1_P5 (SEQ ID NO:371), comprising a first amino acid sequence being at least 90% homologous to MRPLLLLALLGWLLLAEAKGDAKPEDNLLVLTVATKETEGFRRFKRSAQFFNYKIQAL GLGEDWNVEKGTSAGGGQKVRLLKKALEKHADKEDLVILFADSYDVLFASGPRELLK KFRQARSQVVFSAEELIYPDRRLETKYPVVSDGKRFLGSGGFIGYAPNLSKLVAEWEGQ DSDSDQLFYTKIFLDPEKREQINITLDHRCRIFQNLDGALDEVVLKFEMGHVRARNLAY DTLPVLIHGNGPTKLQLNYLGNYIPRFWTFETGCTVCDEGLRSLKGIG corresponding to amino acids 1-281 of PLO1_HUMAN_V1 (SEQ ID NO:368), which also corresponds to amino acids 1-281 of HUMLYSYL_PEA_{—}1_P5 (SEQ ID NO:371), and a second amino acid sequence being at least 90% homologous to RLLRLHYPQKHMRLFIHNHEQHHKAQVEEFLAQHGSEYQSVKLVGPEVRMANADARN MGADLCRQDRSCTYYFSVDADVALTEPNSLRLLIQQNKNVIAPLMTRHGRLWSNFWG ALSADGYYARSEDYVDIVQGRRVGVWNVPYISNIYLIKGSALRGELQSSDLFHHSKLDP DMAFCANIRQQDVFMFLTNRHTLGHLLSLDSYRTTHLHNDLWEVFSNPEDWKEKYIH QNYTKALAGKLVETPCPDVYWFPIFTEVACDELVEEMEHFGQWSLGNNKDNRIQGGY ENVPTIDIHMNQIGFEREWHKFLLEYIAPMTEKLYPGYYTRAQFDLAFVVRYKPDEQPS LMPHHDASTFTINIALNRVGVDYEGGGCRFLRYNCSIRAPRKGWTLMHPGRLTHYHEG LPTTRGTRYIAVSFVDP corresponding to amino acids 307-727 of PLO1_HUMAN_V1 (SEQ ID NO:368), which also corresponds to amino acids 282-702 of HUMLYSYL_PEA_{—}1_P5 (SEQ ID NO:371), wherein said first amino acid sequence and second amino acid sequence are contiguous and in a sequential order.

[1090] 2. An isolated chimeric polypeptide encoding for an edge portion of HUMLYSYL_PEA_{—}1_P5 (SEQ ID NO:371), comprising a polypeptide having a length “n”, wherein n is at least about 10 amino acids in length, optionally at least about 20 amino acids in length, preferably at least about 30 amino acids in length, more preferably at least about 40 amino acids in length and most preferably at least about 50 amino acids in length, wherein at least two amino acids comprise GR, having a structure as follows: a sequence starting from any of amino acid numbers 281-x to 281; and ending at any of amino acid numbers 282+((n−2)−x), in which x varies from 0 to n−2.

[1091] It should be noted that the known protein sequence (PLO1_HUMAN (SEQ ID NO:367)) has one or more changes than the sequence given at the end of the application and named as being the amino acid sequence for PLO1_HUMAN_V1 (SEQ ID NO:368). These changes were previously known to occur and are listed in the table below.

TABLE 11
Changes to PLO1_HUMAN_V1 (SEQ ID NO: 368)

| SNP position(s) on | |
|---|---|
| amino acid sequence | Type of change |
| 100 | variant |

[1092] The location of the variant protein was determined according to results from a number of different software programs and analyses, including analyses from SignalP and other specialized programs. The variant protein is believed to be located as follows with regard to the cell: secreted. The protein localization is believed to be secreted because both signal-peptide prediction programs predict that this protein has a signal peptide, and neither trans-membrane region prediction program predicts that this protein has a trans-membrane region.

[1093] Variant protein HUMLYSYL_PEA_{—}1_P5 (SEQ ID NO:371) also has the following non-silent SNPs (Single Nucleotide Polymorphisms) as listed in Table 12, (given according to their position(s) on the amino acid sequence, with the alternative amino acid(s) listed; the last column indicates whether the SNP is known or not; the presence of known SNPs in variant protein HUMLYSYL_PEA_{—}1_P5 (SEQ ID NO:371) Sequence provides support for the deduced sequence of this variant protein according to the present invention).

TABLE 12
Amino acid mutations

| SNP position(s) | | |
|---|---|---|
| on amino acid | Alternative | Previously |
| sequence | amino acid(s) | known SNP? |
| 67 | E -> D | Yes |
| 98 | F -> | No |
| 99 | A -> T | Yes |
| 120 | A -> S | Yes |
| 178 | S -> | No |
| 179 | D -> N | No |
| 204 | C -> | No |
| 232 | A -> G | No |
| 232 | A -> | No |
| 285 | R -> W | Yes |
| 356 | V -> M | Yes |
| 361 | A -> | No |
| 609 | R -> | No |
| 621 | K -> N | Yes |
| 629 | M -> I | Yes |
| 690 | R -> | No |
| 692 | T -> | No |

[1094] Variant protein HUMLYSYL_PEA_{—}1_P5 (SEQ ID NO:371) is encoded by the following transcript(s): HUMLYSYL_PEA_{—}1_T5 (SEQ ID NO:315), for which the sequence(s) is/are given at the end of the application. The coding portion of transcript HUMLYSYL_PEA_T5 (SEQ ID NO:315) is shown in bold; this coding portion starts at position 104 and ends at position 2209. The transcript also has the following SNPs as listed in Table 13 (given according to their position on the nucleotide sequence, with the alternative nucleic acid listed; the last column indicates whether the SNP is known or not; the presence of known SNPs in variant protein HUMLYSYL_PEA_{—}1_P5 (SEQ ID NO:371) Sequence provides support for the deduced sequence of this variant protein according to the present invention).

TABLE 13
Nucleic acid SNPs

| SNP position on | Alternative | Previously known |
|---|---|---|
| nucleotide sequence | nucleic acid | SNP? |
| 37 | C -> | No |
| 71 | C -> | No |
| 102 | C -> | No |
| 217 | C -> A | Yes |
| 304 | G -> C | Yes |
| 370 | A -> G | Yes |
| 397 | C -> | No |
| 397 | C -> T | Yes |
| 398 | G -> A | Yes |
| 461 | G -> T | Yes |
| 636 | G -> | No |
| 638 | G -> A | No |
| 715 | C -> | No |
| 798 | C -> | No |
| 798 | C -> G | No |
| 956 | C -> T | Yes |
| 1169 | G -> A | Yes |
| 1185 | C -> | No |
| 1234 | C -> T | Yes |
| 1414 | G -> C | No |
| 1660 | A -> C | Yes |
| 1929 | G -> | No |
| 1960 | C -> T | Yes |
| 1966 | G -> C | Yes |
| 1990 | G -> T | Yes |
| 2152 | T -> C | Yes |
| 2161 | C -> G | Yes |
| 2172 | G -> | No |
| 2178 | C -> | No |
| 2276 | G -> | No |
| 2283 | C -> G | Yes |
| 2289 | C -> | No |
| 2413 | C -> | No |
| 2413 | C -> T | No |
| 2433 | C -> | No |
| 2470 | G -> A | No |
| 2509 | C -> | No |
| 2509 | C -> G | No |
| 2523 | C -> T | No |
| 2596 | G -> A | No |
| 2596 | G -> C | No |
| 2636 | G -> | No |
| 2643 | C -> T | Yes |
| 2652 | G -> C | Yes |
| 2745 | C -> | No |
| 2759 | G -> C | Yes |
| 2811 | C -> T | Yes |
| 2826 | G -> T | Yes |
| 2882 | C -> A | Yes |

[1095] Variant protein HUMLYSYL_PEA_{—}1_P6 (SEQ ID NO:372) according to the present invention has an amino acid sequence as given at the end of the application; it is encoded by transcript(s) HUMLYSYL_PEA_{—}1_T6 (SEQ ID NO:316). An alignment is given to the known protein (Procollagen-lysine,2-oxoglutarate 5-dioxygenase 1 precursor (SEQ ID NO:367)) at the end of the application. One or more alignments to one or more previously published protein sequences are given at the end of the application. A brief description of the relationship of the variant protein according to the present invention to each such aligned protein is as follows:

[1096] Comparison report between HUMLYSYL_PEA_{—}1_P6 (SEQ ID NO:372) and PLO1_HUMAN_V1 (SEQ ID NO:368):

[1097] 1. An isolated chimeric polypeptide encoding for HUMLYSYL_PEA_{—}1_P6 (SEQ ID NO:372), comprising a first amino acid sequence being at least 90% homologous to MRPLLLLALLGWLLLAEAKGDAKPEDNLLVLTVATKETEGFRRFKRSAQFFNYKI corresponding to amino acids 1-55 of PLO1_HUMAN_V1 (SEQ ID NO:368), which also corresponds to amino acids 1-55 of HUMLYSYL_PEA_{—}1_P6 (SEQ ID NO:372), a second amino acid sequence being at least 70%, optionally at least 80%, preferably at least 85%, more preferably at least 90% and most preferably at least 95% homologous to a polypeptide having the sequence QPVLRGVSL (SEQ ID NO:505) corresponding to amino acids 56-64 of HUMLYSYL_PEA_{—}1_P6 (SEQ ID NO:372), and a third amino acid sequence being at least 90% homologous to QALGLGEDWNVEKGTSAGGGQKVRLLKKALEKHADKEDLVILFADSYDVLFASGPRE LLKKFRQARSQVVFSAEELIYPDRRLETKYPVVSDGKRFLGSGGFIGYAPNLSKLVAEW EGQDSDSDQLFYTKIFLDPEKREQINITLDHRCRIFQNLDGALDEVVLKFEMGHVRARN LAYDTLPVLIHGNGPTKLQLNYLGNYIPRFWTFETGCTVCDEGLRSLKGIGDEALPTVL VGVFIEQPTPFVSLFFQRLLRLHYPQKHMRLFIHNHEQHHKAQVEEFLAQHGSEYQSVK LVGPEVRMANADARNMGADLCRQDRSCTYYFSVDADVALTEPNSLRLLIQQNKNVIA PLMTRHGRLWSNFWGALSADGYYARSEDYVDIVQGRRVGVWNVPYISNIYLIKGSALR GELQSSDLFHHSKLDPDMAFCANIRQQDVFMFLTNRHTLGHLLSLDSYRTTHLHNDLW EVFSNPEDWKEKYIHQNYTKALAGKLVETPCPDVYWFPIFTEVACDELVEEMEHFGQW SLGNNKDNRIQGGYENVPTIDIHMNQIGFEREWHKFLLEYIAPMTEKLYPGYYTRAQFD LAFVVRYKPDEQPSLMPHHDASTFTINIALNRVGVDYEGGGCRFLRYNCSIRAPRKGW TLMHPGRLTHYHEGLPTTRGTRYIAVSFVDP corresponding to amino acids 56-727 of PLO1_HUMAN_V1 (SEQ ID NO:368), which also corresponds to amino acids 65-736 of HUMLYSYL_PEA_{—}1_P6 (SEQ ID NO:372), wherein said first amino acid sequence, second amino acid sequence and third amino acid sequence are contiguous and in a sequential order.

[1098] 2. An isolated polypeptide encoding for an edge portion of HUMLYSYL_PEA_{—}1_P6 (SEQ ID NO:372), comprising an amino acid sequence being at least 70%, optionally at least about 80%, preferably at least about 85%, more preferably at least about 90% and most preferably at least about 95% homologous to the sequence encoding for QPVLRGVSL (SEQ ID NO:505), corresponding to HUMLYSYL_PEA_{—}1_P6 (SEQ ID NO:372).

[1099] It should be noted that the known protein sequence (PLO1_HUMAN (SEQ ID NO:367)) has one or more changes than the sequence given at the end of the application and named as being the amino acid sequence for PLO1_HUMAN_V1 (SEQ ID NO:368). These changes were previously known to occur and are listed in the table below.

TABLE 14
Changes to PLO1_HUMAN_V1 (SEQ ID NO: 368)

| SNP position(s) on | |
|---|---|
| amino acid sequence | Type of change |
| 100 | variant |

[1100] The location of the variant protein was determined according to results from a number of different software programs and analyses, including analyses from SignalP and other specialized programs. The variant protein is believed to be located as follows with regard to the cell: secreted. The protein localization is believed to be secreted because both signal-peptide prediction programs predict that this protein has a signal peptide, and neither trans-membrane region prediction program predicts that this protein has a trans-membrane region.

[1101] Variant protein HUMLYSYL_PEA_{—}1_P6 (SEQ ID NO:372) also has the following non-silent SNPs (Single Nucleotide Polymorphisms) as listed in Table 15, (given according to their position(s) on the amino acid sequence, with the alternative amino acid(s) listed; the last column indicates whether the SNP is known or not; the presence of known SNPs in variant protein HUMLYSYL_PEA_{—}1_P6 (SEQ ID NO:372) Sequence provides support for the deduced sequence of this variant protein according to the present invention).

TABLE 15
Amino acid mutations

| SNP position(s) on | Alternative | Previously known |
|---|---|---|
| amino acid sequence | amino acid(s) | SNP? |
| 76 | E -> D | Yes |
| 107 | F -> | No |
| 108 | A -> T | Yes |
| 129 | A -> S | Yes |
| 187 | S -> | No |
| 188 | D -> N | No |
| 213 | C -> | No |
| 241 | A -> | No |
| 241 | A -> G | No |
| 319 | R -> W | Yes |
| 390 | V -> M | Yes |
| 395 | A -> | No |
| 643 | R -> | No |
| 655 | K -> N | Yes |
| 663 | M -> I | Yes |
| 724 | R -> | No |
| 726 | T -> | No |

[1102] Variant protein HUMLYSYL_PEA_{—}1_P6 (SEQ ID NO:372) is encoded by the following transcript(s): HUMLYSYL_PEA_{—}1_T6 (SEQ ID NO:316), for which the sequence(s) is/are given at the end of the application. The coding portion of transcript HUMLYSYL_PEA_{—}1_T6 (SEQ ID NO:316) is shown in bold; this coding portion starts at position 104 and ends at position 2311. The transcript also has the following SNPs as listed in Table 16 (given according to their position on the nucleotide sequence, with the alternative nucleic acid listed; the last column indicates whether the SNP is known or not; the presence of known SNPs in variant protein HUMLYSYL_PEA_{—}1_P6 (SEQ ID NO:372) Sequence provides support for the deduced sequence of this variant protein according to the present invention).

TABLE 16
Nucleic acid SNPs

| SNP position on | Alternative | Previously known |
|---|---|---|
| nucleotide sequence | nucleic acid | SNP? |
| 37 | C -> | No |
| 71 | C -> | No |
| 102 | C -> | No |
| 217 | C -> A | Yes |
| 331 | G -> C | Yes |
| 397 | A -> G | Yes |
| 424 | C -> | No |
| 424 | C -> T | Yes |
| 425 | G -> A | Yes |
| 488 | G -> T | Yes |
| 663 | G -> | No |
| 665 | G -> A | No |
| 742 | C -> | No |
| 825 | C -> | No |
| 825 | C -> G | No |
| 1058 | C -> T | Yes |
| 1271 | G -> A | Yes |
| 1287 | C -> | No |
| 1336 | C -> T | Yes |
| 1516 | G -> C | No |
| 1762 | A -> C | Yes |
| 2031 | G -> | No |
| 2062 | C -> T | Yes |
| 2068 | G -> C | Yes |
| 2092 | G -> T | Yes |
| 2254 | T -> C | Yes |
| 2263 | C -> G | Yes |
| 2274 | G -> | No |
| 2280 | C -> | No |
| 2378 | G -> | No |
| 2385 | C -> G | Yes |
| 2391 | C -> | No |
| 2515 | C -> | No |
| 2515 | C -> T | No |
| 2535 | C -> | No |
| 2572 | G -> A | No |
| 2611 | C -> | No |
| 2611 | C -> G | No |
| 2625 | C -> T | No |
| 2698 | G -> A | No |
| 2698 | G -> C | No |
| 2738 | G -> | No |
| 2745 | C -> T | Yes |
| 2754 | G -> C | Yes |
| 2847 | C -> | No |
| 2861 | G -> C | Yes |
| 2913 | C -> T | Yes |
| 2928 | G -> T | Yes |
| 2984 | C -> A | Yes |

[1103] Variant protein HUMLYSYL_PEA_{—}1_P7 (SEQ ID NO:373) according to the present invention has an amino acid sequence as given at the end of the application; it is encoded by transcript(s) HUMLYSYL_PEA_{—}1_T9 (SEQ ID NO:318). An alignment is given to the known protein (Procollagen-lysine,2-oxoglutarate 5-dioxygenase 1 precursor (SEQ ID NO:367)) at the end of the application. One or more alignments to one or more previously published protein sequences are given at the end of the application. A brief description of the relationship of the variant protein according to the present invention to each such aligned protein is as follows:

[1104] Comparison report between HUMLYSYL_PEA_{—}1_P7 (SEQ ID NO:373) and PLO1_HUMAN_V1 (SEQ ID NO:368):

[1105] 1. An isolated chimeric polypeptide encoding for HUMLYSYL_PEA_{—}1_P7 (SEQ ID NO:373), comprising a first amino acid sequence being at least 90% homologous to MRPLLLLALLGWLLLAEAKGDAKPEDNLLVLTVATKETEGFRRFKRSAQFFNYKIQAL GLGEDWNVEKGTSAGGGQKVRLLKKALEKHADKEDLVILFADSYDVLFASGPRELLK KFRQARSQVVFSAEELIYPDRRLETKYPVVSDGKRFLGSGGFIGYAPNLSKLVAEWEGQ DSDSDQLFYTKIFLDPEKREQINITLDHRCRIFQNLDGAL corresponding to amino acids 1-214 of PLO1_HUMAN_V1 (SEQ ID NO:368), which also corresponds to amino acids 1-214 of HUMLYSYL_PEA_{—}1_P7 (SEQ ID NO:373), a second amino acid sequence being at least 70%, optionally at least 80%, preferably at least 85%, more preferably at least 90% and most preferably at least 95% homologous to a polypeptide having the sequence VSPWGQGHLPGACYELTASVLTSELSVMPSFPA (SEQ ID NO:506) corresponding to amino acids 215-247 of HUMLYSYL_PEA_{—}1_P7 (SEQ ID NO:373), a third amino acid sequence being at least 90% homologous to VV corresponding to amino acids 217-218 of PLO1_HUMAN_V1 (SEQ ID NO:368), which also corresponds to amino acids 248-249 of HUMLYSYL_PEA_{—}1_P7 (SEQ ID NO:373), and a fourth amino acid sequence being at least 90% homologous to LQLNYLGNYIPRFWTFETGCTVCDEGLRSLKGIGDEALPTVLVGVFIEQPTPFVSLFFQR LLRLHYPQKHMRLFIHNHEQHHKAQVEEFLAQHGSEYQSVKLVGPEVRMANADARN MGADLCRQDRSCTYYFSVDADVALTEPNSLRLLIQQNKNVIAPLMTRHGRLWSNFWG ALSADGYYARSEDYVDIVQGRRVGVWNVPYISNIYLIKGSALRGELQSSDLFHHSKLDP DMAFCANIRQQDVFMFLTNRHTLGHLLSLDSYRTTHLHNDLWEVFSNPEDWKEKYIH QNYTKALAGKLVETPCPDVYWFPIFTEVACDELVEEMEHFGQWSLGNNKDNRIQGGY ENVPTIDIHMNQIGFEREWHKFLLEYIAPMTEKLYPGYYTRAQFDLAFVVRYKPDEQPS LMPHHDASTFTINIALNRVGVDYEGGGCRFLRYNCSIRAPRKGWTLMHPGRLTHYHEG LPTTRGTRYIAVSFVDP corresponding to amino acids 248-727 of PLO1_HUMAN_V1 (SEQ ID NO:368), which also corresponds to amino acids 250-729 of HUMLYSYL_PEA_{—}1_P7 (SEQ ID NO:373), wherein said first amino acid sequence, second amino acid sequence, third amino acid sequence and fourth amino acid sequence are contiguous and in a sequential order.

[1106] 2. An isolated polypeptide encoding for an edge portion of HUMLYSYL_PEA_{—}1_P7 (SEQ ID NO:373), comprising an amino acid sequence being at least 70%, optionally at least about 80%, preferably at least about 85%, more preferably at least about 90% and most preferably at least about 95% homologous to the sequence encoding for VSPWGQGHLPGACYELTASVLTSELSVMPSFPA (SEQ ID NO:506), corresponding to HUMLYSYL_PEA_{—}1_P7 (SEQ ID NO:373).

[1107] 3. A bridge portion of HUMLYSYL_PEA_{—}1_P7 (SEQ ID NO:373), comprising a polypeptide having a length “n”, wherein n is at least about 10 amino acids in length, optionally at least about 20 amino acids in length, preferably at least about 30 amino acids in length, more preferably at least about 40 amino acids in length and most preferably at least about 50 amino acids in length, wherein at least two amino acids comprise LV, having a structure as follows (numbering according to HUMLYSYL_PEA_{—}1_P7 (SEQ ID NO:373)): a sequence starting from any of amino acid numbers 214−x to 214; and ending at any of amino acid numbers 215+((n−2)−x), in which x varies from 0 to n−2.

[1108] 4. An isolated chimeric polypeptide encoding for an edge portion of HUMLYSYL_PEA_{—}1_P7 (SEQ ID NO:373), comprising a polypeptide having a length “n”, wherein n is at least about 10 amino acids in length, optionally at least about 20 amino acids in length, preferably at least about 30 amino acids in length, more preferably at least about 40 amino acids in length and most preferably at least about 50 amino acids in length, wherein at least two amino acids comprise VL, having a structure as follows: a sequence starting from any of amino acid numbers 249−x to 249; and ending at any of amino acid numbers 250+((n−2)−x), in which x varies from 0 to n−2.

[1109] It should be noted that the known protein sequence (PLO1_HUMAN (SEQ ID NO:367)) has one or more changes than the sequence given at the end of the application and named as being the amino acid sequence for PLO1_HUMAN_V1 (SEQ ID NO:368). These changes were previously known to occur and are listed in the table below.

TABLE 17
Changes to PLO1_HUMAN_V1 (SEQ ID NO: 368)

| SNP position(s) on | |
|---|---|
| amino acid sequence | Type of change |
| 100 | variant |

[1110] The location of the variant protein was determined according to results from a number of different software programs and analyses, including analyses from SignalP and other specialized programs. The variant protein is believed to be located as follows with regard to the cell: secreted. The protein localization is believed to be secreted because both signal-peptide prediction programs predict that this protein has a signal peptide, and neither trans-membrane region prediction program predicts that this protein has a trans-membrane region.

[1111] Variant protein HUMLYSYL_PEA_{—}1_P7 (SEQ ID NO:373) also has the following non-silent SNPs (Single Nucleotide Polymorphisms) as listed in Table 18, (given according to their position(s) on the amino acid sequence, with the alternative amino acid(s) listed; the last column indicates whether the SNP is known or not; the presence of known SNPs in variant protein HUMLYSYL_PEA_{—}1_P7 (SEQ ID NO:373) Sequence provides support for the deduced sequence of this variant protein according to the present invention).

TABLE 18
Amino acid mutations

| SNP position(s) on | Alternative | Previously known |
|---|---|---|
| amino acid sequence | amino acid(s) | SNP? |
| 67 | E -> D | Yes |
| 98 | F -> | No |
| 99 | A -> T | Yes |
| 120 | A -> S | Yes |
| 178 | S -> | No |
| 179 | D -> N | No |
| 204 | C -> | No |
| 312 | R -> W | Yes |
| 383 | V -> M | Yes |
| 388 | A -> | No |
| 636 | R -> | No |
| 648 | K -> N | Yes |
| 656 | M -> I | Yes |
| 717 | R -> | No |
| 719 | T -> | No |

[1112] Variant protein HUMLYSYL_PEA_{—}1_P7 (SEQ ID NO:373) is encoded by the following transcript(s): HUMLYSYL_PEA_{—}1_T9 (SEQ ID NO:318), for which the sequence(s) is/are given at the end of the application. The coding portion of transcript HUMLYSYL_PEA_{—}1_T9 (SEQ ID NO:318) is shown in bold; this coding portion starts at position 104 and ends at position 2290. The transcript also has the following SNPs as listed in Table 19 (given according to their position on the nucleotide sequence, with the alternative nucleic acid listed; the last column indicates whether the SNP is known or not; the presence of known SNPs in variant protein HUMLYSYL_PEA_{—}1_P7 (SEQ ID NO:373) Sequence provides support for the deduced sequence of this variant protein according to the present invention).

TABLE 19
Nucleic acid SNPs

| SNP position on | Alternative | Previously known |
|---|---|---|
| nucleotide sequence | nucleic acid | SNP? |
| 37 | C -> | No |
| 71 | C -> | No |
| 102 | C -> | No |
| 217 | C -> A | Yes |
| 304 | G -> C | Yes |
| 370 | A -> G | Yes |
| 397 | C -> | No |
| 397 | C -> T | Yes |
| 398 | G -> A | Yes |
| 461 | G -> T | Yes |
| 636 | G -> | No |
| 638 | G -> A | No |
| 715 | C -> | No |
| 1037 | C -> T | Yes |
| 1250 | G -> A | Yes |
| 1266 | C -> | No |
| 1315 | C -> T | Yes |
| 1495 | G -> C | No |
| 1741 | A -> C | Yes |
| 2010 | G -> | No |
| 2041 | C -> T | Yes |
| 2047 | G -> C | Yes |
| 2071 | G -> T | Yes |
| 2233 | T -> C | Yes |
| 2242 | C -> G | Yes |
| 2253 | G -> | No |
| 2259 | C -> | No |
| 2357 | G -> | No |
| 2364 | C -> G | Yes |
| 2370 | C -> | No |
| 2494 | C -> | No |
| 2494 | C -> T | No |
| 2514 | C -> | No |
| 2551 | G -> A | No |
| 2590 | C -> | No |
| 2590 | C -> G | No |
| 2604 | C -> T | No |
| 2677 | G -> A | No |
| 2677 | G -> C | No |
| 2717 | G -> | No |
| 2724 | C -> T | Yes |
| 2733 | G -> C | Yes |
| 2826 | C -> | No |
| 2840 | G -> C | Yes |
| 2892 | C -> T | Yes |
| 2907 | G -> T | Yes |
| 2963 | C -> A | Yes |

[1113] Variant protein HUMLYSYL_PEA_{—}1_P13 (SEQ ID NO:374) according to the present invention has an amino acid sequence as given at the end of the application; it is encoded by transcript(s) HUMLYSYL PEA_{—}1_T19 (SEQ ID NO:319). An alignment is given to the known protein (Procollagen-lysine,2-oxoglutarate 5-dioxygenase 1 precursor (SEQ ID NO:367) at the end of the application. One or more alignments to one or more previously published protein sequences are given at the end of the application. A brief description of the relationship of the variant protein according to the present invention to each such aligned protein is as follows:

[1114] Comparison report between HUMLYSYL_PEA_{—}1_P13 (SEQ ID NO:374) and PLO1_HUMAN_V1 (SEQ ID NO:368):

[1115] An isolated chimeric polypeptide encoding for HUMLYSYL_PEA_{—}1_P13 (SEQ ID NO:374), comprising a first amino acid sequence being at least 90% homologous to MRPLLLLALLGWLLLAEAKGDAKPEDNLLVLTVATKETEGFRRFKRSAQFFNYKIQAL GLGEDWNVEKGTSAGGGQKVRLLKKALEKHADKEDLVILFADSYDVLFASGPRELLK KFRQARSQVVFSAEELIYPDRRLETKYPVVSDGKRFLGSGGFIGYAPNLSKLVAEWEGQ DSDSDQLFYTKIFLDPEKREQINITLDHRCRIFQNLDGALDEVVLKFEMGHVRARNLAY DTLPVLIHGNGPTKLQLNYLGNYIPRFWTFETGCTVCDEGLRSLKGIGDEALPTVLVGV FIEQPTPFVSLFFQRLLRLHYPQKHMRLFIHNHEQHHKAQVEEFLAQHGSEYQSVKLVG PEVRMANADARNMGADLCRQDRSCTYYFSVDADVALTEPNSLRLLIQQNKNVIAPLM TRHGRLWSNFWGALSADGYYARSEDYVDIVQGRRVGVWNVPYISNIYLIKGSALRGEL QSSDLFHHSKLDPDMAFCANIRQQDVFMFLTNRHTLGHLLSLDSYRTTHLHNDLWEVF SNPEDWKEKYIHQNYTKALAGKLVETPCPDVYWFPIFTEVACDELVEEMEHFGQWSLG NNK corresponding to amino acids 1-585 of PLO1_HUMAN_V1 (SEQ ID NO:368), which also corresponds to amino acids 1-585 of HUMLYSYL_PEA_{—}1_P13 (SEQ ID NO:374), and a second amino acid sequence being at least 70%, optionally at least 80%, preferably at least 85%, more preferably at least 90% and most preferably at least 95% homologous to a polypeptide having the sequence GCPESGTSASMAGHESKP (SEQ ID NO:475) corresponding to amino acids 586-603 of HUMLYSYL_PEA_{—}1_P13 (SEQ ID NO:374), wherein said first amino acid sequence and second amino acid sequence are contiguous and in a sequential order.

[1116] 2. An isolated polypeptide encoding for a tail of HUMLYSYL_PEA_{—}1_P13 (SEQ ID NO:3741, comprising a polypeptide being at least 70%, optionally at least about 80%, preferably at least about 85%, more preferably at least about 90% and most preferably at least about 95% homologous to the sequence GCPESGTSASMAGHESKP (SEQ ID NO:475) in HUMLYSYL_PEA_{—}1_P13 (SEQ ID NO:374).

[1117] It should be noted that the known protein sequence (PLO1_HUMAN (SEQ ID NO:367)) has one or more changes than the sequence given at the end of the application and named as being the amino acid sequence for PLO1_HUMAN_V1 (SEQ ID NO:368). These changes were previously known to occur and are listed in the table below.

TABLE 20
Changes to PLO1_HUMAN_V1 (SEQ ID NO: 368)

| SNP position(s) on | |
|---|---|
| amino acid sequence | Type of change |
| 100 | variant |

[1118] The location of the variant protein was determined according to results from a number of different software programs and analyses, including analyses from SignalP and other specialized programs. The variant protein is believed to be located as follows with regard to the cell: secreted. The protein localization is believed to be secreted because both signal-peptide prediction programs predict that this protein has a signal peptide, and neither trans-membrane region prediction program predicts that this protein has a trans-membrane region.

[1119] Variant protein HUMLYSYL_PEA_{—}1_P13 (SEQ ID NO:374) also has the following non-silent SNPs (Single Nucleotide Polymorphisms) as listed in Table 21, (given according to their position(s) on the amino acid sequence, with the alternative amino acid(s) listed; the last column indicates whether the SNP is known or not; the presence of known SNPs in variant protein HUMLYSYL_PEA_{—}1_P13 (SEQ ID NO:374) Sequence provides support for the deduced sequence of this variant protein according to the present invention).

TABLE 21
Amino acid mutations

| SNP position(s) on | Alternative | Previously known |
|---|---|---|
| amino acid sequence | amino acid(s) | SNP? |
| 67 | E -> D | Yes |
| 98 | F -> | No |
| 99 | A -> T | Yes |
| 120 | A -> S | Yes |
| 178 | S -> | No |
| 179 | D -> N | No |
| 204 | C -> | No |
| 232 | A -> G | No |
| 232 | A -> | No |
| 310 | R -> W | Yes |
| 381 | V -> M | Yes |
| 386 | A -> | No |

[1120] Variant protein HUMLYSYL_PEA_{—}1_P13 (SEQ ID NO:374) is encoded by the following transcript(s): HUMLYSYL_PEA_{—}1_T19 (SEQ ID NO:319), for which the sequence(s) is/are given at the end of the application. The coding portion of transcript HUMLYSYL_PEA_{—}1_T19 (SEQ ID NO:319) is shown in bold; this coding portion starts at position 104 and ends at position 1912. The transcript also has the following SNPs as listed in Table 22 (given according to their position on the nucleotide sequence, with the alternative nucleic acid listed; the last column indicates whether the SNP is known or not; the presence of known SNPs in variant protein HUMLYSYL_PEA_{—}1_P13 (SEQ ID NO:374) Sequence provides support for the deduced sequence of this variant protein according to the present invention).

TABLE 22
Nucleic acid SNPs

| SNP position on | Alternative | Previously known |
|---|---|---|
| nucleotide sequence | nucleic acid | SNP? |
| 37 | C -> | No |
| 71 | C -> | No |
| 102 | C -> | No |
| 217 | C -> A | Yes |
| 304 | G -> C | Yes |
| 370 | A -> G | Yes |
| 397 | C -> | No |
| 397 | C -> T | Yes |
| 398 | G -> A | Yes |
| 461 | G -> T | Yes |
| 636 | G -> | No |
| 638 | G -> A | No |
| 715 | C -> | No |
| 798 | C -> | No |
| 798 | C -> G | No |
| 1031 | C -> T | Yes |
| 1244 | G -> A | Yes |
| 1260 | C -> | No |
| 1309 | C -> T | Yes |
| 1489 | G -> C | No |
| 1735 | A -> C | Yes |
| 1917 | C -> | No |
| 1931 | G -> C | Yes |
| 1983 | C -> T | Yes |
| 1998 | G -> T | Yes |
| 2054 | C -> A | Yes |

[1121] Variant protein HUMLYSYL_PEA_{—}1_P14 (SEQ ID NO:375) according to the present invention has an amino acid sequence as given at the end of the application; it is encoded by transcript(s) HUMLYSYL_PEA_{—}1_T20 (SEQ ID NO:320). An alignment is given to the known protein (Procollagen-lysine,2-oxoglutarate 5-dioxygenase 1 precursor (SEQ ID NO:367)) at the end of the application. One or more alignments to one or more previously published protein sequences are given at the end of the application. A brief description of the relationship of the variant protein according to the present invention to each such aligned protein is as follows:

[1122] Comparison report between HUMLYSYL_PEA_{—}1_P14 (SEQ ID NO:375) and PLO1_HUMAN_V1 (SEQ ID NO:368):

[1123] 1. An isolated chimeric polypeptide encoding for HUMLYSYL_PEA_{—}1_P14 (SEQ ID NO:375), comprising a first amino acid sequence being at least 90% homologous to MRPLLLLALLGWLLLAEAKGDAKPEDNLLVLTVATKETEGFRRFKRSAQFFNYKIQAL GLGEDWNVEKGTSAGGGQKVRLLKKALEKHADKEDLVILFADSYDVLFASGPRELLK KFRQARSQVVFSAEELIYPDRRLETKYPVVSDGKRFLGSGGFIGYAPNLSKLVAEWEGQ DSDSDQLFYTKIFLDPEKREQINITLDHRCRIFQNLDGALDEVVLKFEMGHVRARNLAY DTLPVLIHGNGPTKLQLNYLGNYIPRFWTFETGCTVCDEGLRSLKGIGDEALPTVLVGV FIEQPTPFVSLFFQRLLRLHYPQKHMRLFIHNHEQHHKAQVEEFLAQHGSEYQSVKLVG PEVRMANADARNMGADLCRQDRSCTYYFSVDADVALTEPNSLRLLIQQNKNVIAPLM TRHGRLWSNFWGALSADGYYARSEDYVDIVQGRRVGVWNVPYISNIYLIKGSALRGEL QSSDLFHHSKLDPDMAFCANIRQQDVFMFLTNRHTLGHLLSLDSYRTTHLHNDLWEVF SNPEDWKEKYIHQNYTKALAGKLVETPCPDVYWFPIFTEVACDELVEEMEHFGQWSLG NNK corresponding to amino acids 1-585 of PLO1_HUMAN_V1 (SEQ ID NO:368), which also corresponds to amino acids 1-585 of HUMLYSYL_PEA_{—}1_P14 (SEQ ID NO:375), and a second amino acid sequence being at least 70%, optionally at least 80%, preferably at least 85%, more preferably at least 90% and most preferably at least 95% homologous to a polypeptide having the sequence TATPENLLGDRRGICAQLDLLLACGEGSDRSTHHTGSPCPGCL (SEQ ID NO:476) corresponding to amino acids 586-628 of HUMLYSYL_PEA_{—}1_P14 (SEQ ID NO:375), wherein said first amino acid sequence and second amino acid sequence are contiguous and in a sequential order.

[1124] 2. An isolated polypeptide encoding for a tail of HUMLYSYL_PEA_{—}1_P14 (SEQ ID NO:375), comprising a polypeptide being at least 70%, optionally at least about 80%, preferably at least about 85%, more preferably at least about 90% and most preferably at least about 95% homologous to the sequence TATPENLLGDRRGICAQLDLLLACGEGSDRSTHHTGSPCPGCL (SEQ ID NO:476) in HUMLYSYL_PEA_{—}1_P14 (SEQ ID NO:375).

[1125] It should be noted that the known protein sequence (PLO1_HUMAN (SEQ ID NO:367)) has one or more changes than the sequence given at the end of the application and named as being the amino acid sequence for PLO1_HUMAN_V1 (SEQ ID NO:368). These changes were previously known to occur and are listed in the table below.

TABLE 23
Changes to PLO1_HUMAN_V1 (SEQ ID NO: 368)

| SNP position(s) on | |
|---|---|
| amino acid sequence | Type of change |
| 100 | variant |

[1126] The location of the variant protein was determined according to results from a number of different software programs and analyses, including analyses from SignalP and other specialized programs. The variant protein is believed to be located as follows with regard to the cell: secreted. The protein localization is believed to be secreted because both signal-peptide prediction programs predict that this protein has a signal peptide, and neither trans-membrane region prediction program predicts that this protein has a trans-membrane region.

[1127] Variant protein HUMLYSYL_PEA_{—}1_P14 (SEQ ID NO:375) also has the following non-silent SNPs (Single Nucleotide Polymorphisms) as listed in Table 24, (given according to their position(s) on the amino acid sequence, with the alternative amino acid(s) listed; the last column indicates whether the SNP is known or not; the presence of known SNPs in variant protein HUMLYSYL_PEA_{—}1_P14 (SEQ ID NO:375) Sequence provides support for the deduced sequence of this variant protein according to the present invention).

TABLE 24
Amino acid mutations

| SNP position(s) on amino acid | Alternative amino | Previously known |
|---|---|---|
| sequence | acid(s) | SNP? |
| 67 | E -> D | Yes |
| 98 | F -> | No |
| 99 | A -> T | Yes |
| 120 | A -> S | Yes |
| 178 | S -> | No |
| 179 | D -> N | No |
| 204 | C -> | No |
| 232 | A -> G | No |
| 232 | A -> | No |
| 310 | R -> W | Yes |
| 381 | V -> M | Yes |
| 386 | A -> | No |
| 605 | L -> F | Yes |
| 610 | G -> W | Yes |

[1128] Variant protein HUMLYSYL_PEA_{—}1_P14 (SEQ ID NO:375) is encoded by the following transcript(s): HUMLYSYL_PEA_{—}1_T20 (SEQ ID NO:320), for which the sequence(s) is/are given at the end of the application. The coding portion of transcript HUMLYSYL_PEA_{—}1_T20 (SEQ ID NO:320) is shown in bold; this coding portion starts at position 104 and ends at position 1987. The transcript also has the following SNPs as listed in Table 25 (given according to their position on the nucleotide sequence, with the alternative nucleic acid listed; the last column indicates whether the SNP is known or not; the presence of known SNPs in variant protein HUMLYSYL_PEA_{—}1_P14 (SEQ ID NO:375) Sequence provides support for the deduced sequence of this variant protein according to the present invention).

TABLE 25
Nucleic acid SNPs

| SNP position on nucleotide | Alternative nucleic | Previously known |
|---|---|---|
| sequence | acid | SNP? |
| 37 | C -> | No |
| 71 | C -> | No |
| 102 | C -> | No |
| 217 | C -> A | Yes |
| 304 | G -> C | Yes |
| 370 | A -> G | Yes |
| 397 | C -> | No |
| 397 | C -> T | Yes |
| 398 | G -> A | Yes |
| 461 | G -> T | Yes |
| 636 | G -> | No |
| 638 | G -> A | No |
| 715 | C -> | No |
| 798 | C -> | No |
| 798 | C -> G | No |
| 1031 | C -> T | Yes |
| 1244 | G -> A | Yes |
| 1260 | C -> | No |
| 1309 | C -> T | Yes |
| 1489 | G -> C | No |
| 1735 | A -> C | Yes |
| 1864 | G -> C | Yes |
| 1916 | C -> T | Yes |
| 1931 | G -> T | Yes |
| 1987 | C -> A | Yes |

[1129] Variant protein HUMLYSYL_PEA_{—}1_P16 (SEQ ID NO:376) according to the present invention has an amino acid sequence as given at the end of the application; it is encoded by transcript(s) HUMLYSYL_PEA_{—}1_T22 (SEQ ID NO:321). An alignment is given to the known protein (Procollagen-lysine,2-oxoglutarate 5-dioxygenase 1 precursor (SEQ ID NO:367)) at the end of the application. One or more alignments to one or more previously published protein sequences are given at the end of the application. A brief description of the relationship of the variant protein according to the present invention to each such aligned protein is as follows:

[1130] Comparison report between HUMLYSYL_PEA_{—}1_P16 (SEQ ID NO:376) and PLO1_HUMAN_V1 (SEQ ID NO:368):

[1131] 1. An isolated chimeric polypeptide encoding for HUMLYSYL_PEA_{—}1_P16 (SEQ ID NO:376), comprising a first amino acid sequence being at least 90% homologous to MRPLLLLALLGWLLLAEAKGDAKPEDNLLVLTVATKETEGFRRFKRSAQFFNYKIQAL GLGEDWNVEKGTSAGGGQKVRLLKKALEKHADKEDLVILFADSYDVLFASGPRELLK KFRQARSQVVFSAEELIYPDRRLETKYPVVSDGKRFLGSGGFIGYAPNLSKLVAEWEGQ DSDSDQLFYTKIFLDPEKREQINITLDHRCRIFQNLDGALDEVVLKFEMGHVRARNLAY DTLPVLIHGNGPTKLQLNYLGNYIPRFWTFETGCTVCDEGLRSLKGIGDEALPTVLVGV FIEQPTPFVSLFFQRLLRLHYPQKHMRLFIHNHEQHHKAQVEEFLAQHGSEYQSVKLVG PEVRMANADARNMGADLCRQDRSCTYYFSVDADVALTEPNSLRLLIQQNKNVIAPLM TRHGRLWSNFWGALSADGYYARSEDYVDIVQGRRVGVWNVPYISNIYLIKGSALRGEL QSSDLFHHSKLDPDMAFCANIRQQDVFMFLTNRHTLGHLLSLDSYRTTHLHNDLWEVF SNPEDWKEKYIHQNYTKALAGKLVET corresponding to amino acids 1-550 of PLO1_HUMAN_V1 (SEQ ID NO:368), which also corresponds to amino acids 1-550 of HUMLYSYL_PEA_{—}1_P16 (SEQ ID NO:376), and a second amino acid sequence being at least 70%, optionally at least 80%, preferably at least 85%, more preferably at least 90% and most preferably at least 95% homologous to a polypeptide having the sequence VRAMDTLLDQPCLLQGAGHRRETACPGEWGTAGWEL (SEQ ID NO:477) corresponding to amino acids 551-586 of HUMLYSYL_PEA_{—}1_P16 (SEQ ID NO:376), wherein said first amino acid sequence and second amino acid sequence are contiguous and in a sequential order.

[1132] 2. An isolated polypeptide encoding for a tail of HUMLYSYL_PEA_{—}1_P16 (SEQ ID NO:376), comprising a polypeptide being at least 70%, optionally at least about 80%, preferably at least about 85%, more preferably at least about 90% and most preferably at least about 95% homologous to the sequence VRAMDTLLDQPCLLQGAGHRRETACPGEWGTAGWEL (SEQ ID NO:477) in HUMLYSYL_PEA_{—}1_P16 (SEQ ID NO:376).

[1133] It should be noted that the known protein sequence (PLO1_HUMAN) Has one or more changes than the sequence given at the end of the application and named as being the amino acid sequence for PLO1_HUMAN_V1 (SEQ ID NO:368). These changes were previously known to occur and are listed in the table below.

TABLE 26
Changes to PLO1_HUMAN_V1 (SEQ ID NO: 368)

| SNP position(s) on | |
|---|---|
| amino acid sequence | Type of change |
| 100 | variant |

[1134] The location of the variant protein was determined according to results from a number of different software programs and analyses, including analyses from SignalP and other specialized programs. The variant protein is believed to be located as follows with regard to the cell: secreted. The protein localization is believed to be secreted because both signal-peptide prediction programs predict that this protein has a signal peptide, and neither trans-membrane region prediction program predicts that this protein has a trans-membrane region.

[1135] Variant protein HUMLYSYL_PEA_{—}1_P16 (SEQ ID NO:376) also has the following non-silent SNPs (Single Nucleotide Polymorphisms) as listed in Table 27, (given according to their position(s) on the amino acid sequence, with the alternative amino acid(s) listed; the last column indicates whether the SNP is known or not; the presence of known SNPs in variant protein HUMLYSYL_PEA_{—}1_P16 (SEQ ID NO:376) Sequence provides support for the deduced sequence of this variant protein according to the present invention).

TABLE 27
Amino acid mutations

| SNP position(s) on amino acid | Alternative amino | Previously known |
|---|---|---|
| sequence | acid(s) | SNP? |
| 67 | E -> D | Yes |
| 98 | F -> | No |
| 99 | A -> T | Yes |
| 120 | A -> S | Yes |
| 178 | S -> | No |
| 179 | D -> N | No |
| 204 | C -> | No |
| 232 | A -> G | No |
| 232 | A -> | No |
| 310 | R -> W | Yes |
| 381 | V -> M | Yes |
| 386 | A -> | No |

[1136] Variant protein HUMLYSYL_PEA_{—}1_P16 (SEQ ID NO:376) is encoded by the following transcript(s): HUMLYSYL_PEA_{—}1_T22 (SEQ ID NO:321), for which the sequence(s) is/are given at the end of the application. The coding portion of transcript HUMLYSYL_PEA_{—}1_T22 (SEQ ID NO:321) is shown in bold; this coding portion starts at position 104 and ends at position 88889. The transcript also has the following SNPs as listed in Table 28 (given according to their position on the nucleotide sequence, with the alternative nucleic acid listed; the last column indicates whether the SNP is known or not; the presence of known SNPs in variant protein HUMLYSYL_PEA_{—}1_P16 (SEQ ID NO:376) Sequence provides support for the deduced sequence of this variant protein according to the present invention).

TABLE 28
Nucleic acid SNPs

| SNP position on nucleotide | Alternative nucleic | Previously known |
|---|---|---|
| sequence | acid | SNP? |
| 37 | C -> | No |
| 71 | C -> | No |
| 102 | C -> | No |
| 217 | C -> A | Yes |
| 304 | G -> C | Yes |
| 370 | A -> G | Yes |
| 397 | C -> | No |
| 397 | C -> T | Yes |
| 398 | G -> A | Yes |
| 461 | G -> T | Yes |
| 636 | G -> | No |
| 638 | G -> A | No |
| 715 | C -> | No |
| 798 | C -> | No |
| 798 | C -> G | No |
| 1031 | C -> T | Yes |
| 1244 | G -> A | Yes |
| 1260 | C -> | No |
| 1309 | C -> T | Yes |
| 1489 | G -> C | No |
| 1735 | A -> C | Yes |

[1137] Variant protein HUMLYSYL_PEA_{—}1_P18 (SEQ ID NO:377) according to the present invention has an amino acid sequence as given at the end of the application; it is encoded by transcript(s) HUMLYSYL_PEA_{—}1_T24 (SEQ ID NO:322). The location of the variant protein was determined according to results from a number of different software programs and analyses, including analyses from SignalP and other specialized programs. The variant protein is believed to be located as follows with regard to the cell: secreted. The protein localization is believed to be secreted because both signal-peptide prediction programs predict that this protein has a signal peptide, and neither trans-membrane region prediction program predicts that this protein has a trans-membrane region.

[1138] Variant protein HUMLYSYL_PEA_{—}1_P18 (SEQ ID NO:377) also has the following non-silent SNPs (Single Nucleotide Polymorphisms) as listed in Table 29, (given according to their position(s) on the amino acid sequence, with the alternative amino acid(s) listed; the last column indicates whether the SNP is known or not; the presence of known SNPs in variant protein HUMLYSYL_PEA_{—}1_P18 (SEQ ID NO:377) Sequence provides support for the deduced sequence of this variant protein according to the present invention).

TABLE 29
Amino acid mutations

| SNP position(s) on amino acid | Alternative amino | Previously known |
|---|---|---|
| sequence | acid(s) | SNP? |
| 74 | L -> | No |
| 77 | R -> G | Yes |
| 79 | P -> | No |
| 120 | S -> | No |
| 120 | S -> F | No |
| 127 | P -> | No |

[1139] Variant protein HUMLYSYL_PEA_{—}1_P18 (SEQ ID NO:377) is encoded by the following transcript(s): HUMLYSYL_PEA_{—}1_T24 (SEQ ID NO:322), for which the sequence(s) is/are given at the end of the application. The coding portion of transcript HUMLYSYL_PEA_{—}1_T24 (SEQ ID NO:322) is shown in bold; this coding portion starts at position 104 and ends at position 514. The transcript also has the following SNPs as listed in Table 30 (given according to their position on the nucleotide sequence, with the alternative nucleic acid listed; the last column indicates whether the SNP is known or not; the presence of known SNPs in variant protein HUMLYSYL_PEA_{—}1_P18 (SEQ ID NO:377) Sequence provides support for the deduced sequence of this variant protein according to the present invention).

TABLE 30
Nucleic acid SNPs

| SNP position on nucleotide | Alternative nucleic | Previously known |
|---|---|---|
| sequence | acid | SNP? |
| 37 | C -> | No |
| 71 | C -> | No |
| 102 | C -> | No |
| 217 | C -> A | Yes |
| 325 | G -> | No |
| 332 | C -> G | Yes |
| 338 | C -> | No |
| 462 | C -> | No |
| 462 | C -> T | No |
| 482 | C -> | No |
| 519 | G -> A | No |
| 558 | C -> | No |
| 558 | C -> G | No |
| 572 | C -> T | No |
| 645 | G -> A | No |
| 645 | G -> C | No |
| 685 | G -> | No |
| 692 | C -> T | Yes |
| 701 | G -> C | Yes |
| 794 | C -> | No |
| 808 | G -> C | Yes |
| 860 | C -> T | Yes |
| 875 | G -> T | Yes |
| 931 | C -> A | Yes |

[1140] Variant protein HUMLYSYL_PEA_{—}1_P24 (SEQ ID NO:378) according to the present invention has an amino acid sequence as given at the end of the application; it is encoded by transcript(s) HUMLYSYL_PEA_{—}1_T8 (SEQ ID NO:317). An alignment is given to the known protein (Procollagen-lysine,2-oxoglutarate 5-dioxygenase 1 precursor (SEQ ID NO:367)) at the end of the application. One or more alignments to one or more previously published protein sequences are given at the end of the application. A brief description of the relationship of the variant protein according to the present invention to each such aligned protein is as follows:

[1141] Comparison report between HUMLYSYL_PEA_{—}1_P24 (SEQ ID NO:378) and PLO1_HUMAN_V1 (SEQ ID NO:368):

[1142] 1. An isolated chimeric polypeptide encoding for HUMLYSYL_PEA_{—}1_P24 (SEQ ID NO:378), comprising a first amino acid sequence being at least 90% homologous to MRPLLLALLGWLLLAEAKGDAKPEDNLLVLTVATKETEGFRRFKRSAQFFNYKIQAL GLGEDWNVEKGTSAGGGQKVRLLKKALEKHADKEDLVILFADSYDVLFASGPRELLK KFRQARSQVVFSAEELIYPDRRLETKYPVVSDGKRFLGSGGFIGYAPNLSKLVAEWEGQ DSDSDQLFYTKIFLDPEKR corresponding to amino acids 1-193 of PLO1_HUMAN_V1 (SEQ ID NO:368), which also corresponds to amino acids 1-193 of HUMLYSYL_PEA_{—}1_P24 (SEQ ID NO:378), and a second amino acid sequence being at least 70%, optionally at least 80%, preferably at least 85%, more preferably at least 90% and most preferably at least 95% homologous to a polypeptide having the sequence VSRLHS (SEQ ID NO:478) corresponding to amino acids 194-199 of HUMLYSYL_PEA_{—}1_P24 (SEQ ID NO:378), wherein said first amino acid sequence and second amino acid sequence are contiguous and in a sequential order.

[1143] 2. An isolated polypeptide encoding for a tail of HUMLYSYL_PEA_{—}1_P24 (SEQ ID NO:378), comprising a polypeptide being at least 70%, optionally at least about 80%, preferably at least about 85%, more preferably at least about 90% and most preferably at least about 95% homologous to the sequence VSRLHS (SEQ ID NO:478) in HUMLYSYL_PEA_{—}1_P24 (SEQ ID NO:378).

[1144] It should be noted that the known protein sequence (PLO1_HUMAN (SEQ ID NO:367)) has one or more changes than the sequence given at the end of the application and named as being the amino acid sequence for PLO1_HUMAN_V1 (SEQ ID NO:368). These changes were previously known to occur and are listed in the table below.

TABLE 31
Changes to PLO1_HUMAN_V1 (SEQ ID NO: 368)

| SNP position(s) on | |
|---|---|
| amino acid sequence | Type of change |
| 100 | variant |

[1145] The location of the variant protein was determined according to results from a number of different software programs and analyses, including analyses from SignalP and other specialized programs. The variant protein is believed to be located as follows with regard to the cell: secreted. The protein localization is believed to be secreted because both signal-peptide prediction programs predict that this protein has a signal peptide, and neither trans-membrane region prediction program predicts that this protein has a trans-membrane region.

[1146] Variant protein HUMLYSYL_PEA_{—}1_P24 (SEQ ID NO:378) also has the following non-silent SNPs (Single Nucleotide Polymorphisms) as listed in Table 32, (given according to their position(s) on the amino acid sequence, with the alternative amino acid(s) listed; the last column indicates whether the SNP is known or not; the presence of known SNPs in variant protein HUMLYSYL_PEA_{—}1_P24 (SEQ ID NO:378) Sequence provides support for the deduced sequence of this variant protein according to the present invention).

TABLE 32
Amino acid mutations

| SNP position(s) on amino acid | Alternative amino | Previously known |
|---|---|---|
| sequence | acid(s) | SNP? |
| 67 | E -> D | Yes |
| 98 | F -> | No |
| 99 | A -> T | Yes |
| 120 | A -> S | Yes |
| 178 | S -> | No |
| 179 | D -> N | No |

[1147] Variant protein HUMLYSYL_PEA_{—}1_P24 (SEQ ID NO:378) is encoded by the following transcript(s): HUMLYSYL_PEA_{—}1_T8 (SEQ ID NO:317), for which the sequence(s) is/are given at the end of the application. The coding portion of transcript HUMLYSYL_PEA_{—}1_T8 (SEQ ID NO:317) is shown in bold; this coding portion starts at position 104 and ends at position 700. The transcript also has the following SNPs as listed in Table 33 (given according to their position on the nucleotide sequence, with the alternative nucleic acid listed; the last column indicates whether the SNP is known or not; the presence of known SNPs in variant protein HUMLYSYL_PEA_{—}1_P24 (SEQ ID NO:378) Sequence provides support for the deduced sequence of this variant protein according to the present invention).

TABLE 33
Nucleic acid SNPs

| SNP position on nucleotide | | Previously |
|---|---|---|
| sequence | Alternative nucleic acid | known SNP? |
| 37 | C -> | No |
| 71 | C -> | No |
| 102 | C -> | No |
| 217 | C -> A | Yes |
| 304 | G -> C | Yes |
| 370 | A -> G | Yes |
| 397 | C -> | No |
| 397 | C -> T | Yes |
| 398 | G -> A | Yes |
| 461 | G -> T | Yes |
| 636 | G -> | No |
| 638 | G -> A | No |
| 820 | G -> A | Yes |
| 839 | G -> A | Yes |
| 971 | C -> | No |
| 1054 | C -> | No |
| 1054 | C -> G | No |
| 1287 | C -> T | Yes |
| 1500 | G -> A | Yes |
| 1516 | C -> | No |
| 1565 | C -> T | Yes |
| 1745 | G -> C | No |
| 1991 | A -> C | Yes |
| 2260 | G -> | No |
| 2291 | C -> T | Yes |
| 2297 | G -> C | Yes |
| 2321 | G -> T | Yes |
| 2483 | T -> C | Yes |
| 2492 | C -> G | Yes |
| 2503 | G -> | No |
| 2509 | C -> | No |
| 2607 | G -> | No |
| 2614 | C -> G | Yes |
| 2620 | C -> | No |
| 2744 | C -> | No |
| 2744 | C -> T | No |
| 2764 | C -> | No |
| 2801 | G -> A | No |
| 2840 | C -> | No |
| 2840 | C -> G | No |
| 2854 | C -> T | No |
| 2927 | G -> A | No |
| 2927 | G -> C | No |
| 2967 | G -> | No |
| 2974 | C -> T | Yes |
| 2983 | G -> C | Yes |
| 3076 | C -> | No |
| 3090 | G -> C | Yes |
| 3142 | C -> T | Yes |
| 3157 | G -> T | Yes |
| 3213 | C -> A | Yes |

[1148] As noted above, cluster HUMLYSYL features 44 segment(s), which were listed in Table 2 above and for which the sequence(s) are given at the end of the application. These segment(s) are portions of nucleic acid sequence(s) which are described herein separately because they are of particular interest. A description of each segment according to the present invention is now provided.

[1149] Segment cluster HUMLYSYL_PEA_{—}1_node_{—}6 (SEQ ID NO:323) according to the present invention is supported by 3 libraries. The number of libraries was determined as previously described. This segment can be found in the following transcript(s): HUMLYSYL_PEA_{—}1_T4 (SEQ ID NO:314). Table 34 below describes the starting and ending position of this segment on each transcript.

TABLE 34
Segment location on transcripts

| | Segment | Segment |
|---|---|---|
| Transcript name | starting position | ending position |
| HUMLYSYL_PEA_1_T4 (SEQ ID | 180 | 320 |
| NO: 314) | | |

[1150] Segment cluster HUMLYSYL_PEA_{—}1_node_{—}14 (SEQ ID NO:324) according to the present invention is supported by 122 libraries. The number of libraries was determined as previously described. This segment can be found in the following transcript(s): HUMLYSYL_PEA_{—}1_T2 (SEQ ID NO:313), HUMLYSYL_PEA_{—}1_T4 (SEQ ID NO:314), HUMLYSYL_PEA_{—}1_T5 (SEQ ID NO:315), HUMLYSYL_PEA_{—}1_T6 (SEQ ID NO:316), HUMLYSYL_PEA_{—}1_T8 (SEQ ID NO:317), HUMLYSYL_PEA_{—}1_T9 (SEQ ID NO:318), HUMLYSYL_PEA_{—}1_T19 (SEQ ID NO:319), HUMLYSYL_PEA_{—}1_T20 (SEQ ID NO:320) and HUMLYSYL_PEA_{—}1_T22 (SEQ ID NO:321). Table 35 below describes the starting and ending position of this segment on each transcript.

TABLE 35
Segment location on transcripts

| | | Segment |
|---|---|---|
| | Segment | ending |
| Transcript name | starting position | position |
| HUMLYSYL_PEA_1_T2 (SEQ ID | 406 | 569 |
| NO: 313) | | |
| HUMLYSYL_PEA_1_T4 (SEQ ID | 547 | 710 |
| NO: 314) | | |
| HUMLYSYL_PEA_1_T5 (SEQ ID | 406 | 569 |
| NO: 315) | | |
| HUMLYSYL_PEA_1_T6 (SEQ ID | 433 | 596 |
| NO: 316) | | |
| HUMLYSYL_PEA_1_T8 (SEQ ID | 406 | 569 |
| NO: 317) | | |
| HUMLYSYL_PEA_1_T9 (SEQ ID | 406 | 569 |
| NO: 318) | | |
| HUMLYSYL_PEA_1_T19 (SEQ ID | 406 | 569 |
| NO: 319) | | |
| HUMLYSYL_PEA_1_T20 (SEQ ID | 406 | 569 |
| NO: 320) | | |
| HUMLYSYL_PEA_1_T22 (SEQ ID | 406 | 569 |
| NO: 321) | | |

[1151] Segment cluster HUMLYSYL_PEA_{—}1_node_{—}19 (SEQ ID NO:325) according to the present invention is supported by 4 libraries. The number of libraries was determined as previously described. This segment can be found in the following transcript(s): HUMLYSYL_PEA_{—}1_T8 (SEQ ID NO:317). Table 36 below describes the starting and ending position of this segment on each transcript.

TABLE 36
Segment location on transcripts

| | Segment | Segment |
|---|---|---|
| Transcript name | starting position | ending position |
| HUMLYSYL_PEA_1_T8 (SEQ ID | 683 | 938 |
| NO: 317) | | |

[1152] Segment cluster HUMLYSYL_PEA_{—}1_node_{—}38 (SEQ ID NO:326) according to the present invention is supported by 94 libraries. The number of libraries was determined as previously described. This segment can be found in the following transcript(s): HUMLYSYL_PEA_{—}1_T2 (SEQ ID NO:313), HUMLYSYL_PEA_{—}1_T4 (SEQ ID NO:314), HUMLYSYL_PEA_{—}1_T5 (SEQ ID NO:315), HUMLYSYL_PEA_{—}1_T6 (SEQ ID NO:316), HUMLYSYL_PEA_{—}1_T8 (SEQ ID NO:317), HUMLYSYL_PEA_{—}1_T9 (SEQ ID NO:318), HUMLYSYL_PEA_{—}1_T19 (SEQ ID NO:319), HUMLYSYL_PEA_{—}1_T20 (SEQ ID NO:320) and HUMLYSYL_PEA_{—}1_T22 (SEQ ID NO:321). Table 37 below describes the starting and ending position of this segment on each transcript.

TABLE 37
Segment location on transcripts

| | | Segment |
|---|---|---|
| | Segment | ending |
| Transcript name | starting position | position |
| HUMLYSYL_PEA_1_T2 (SEQ ID | 1306 | 1431 |
| NO: 313) | | |
| HUMLYSYL_PEA_1_T4 (SEQ ID | 1447 | 1572 |
| NO: 314) | | |
| HUMLYSYL_PEA_1_T5 (SEQ ID | 1231 | 1356 |
| NO: 315) | | |
| HUMLYSYL_PEA_1_T6 (SEQ ID | 1333 | 1458 |
| NO: 316) | | |
| HUMLYSYL_PEA_1_T8 (SEQ ID | 1562 | 1687 |
| NO: 317) | | |
| HUMLYSYL_PEA_1_T9 (SEQ ID | 1312 | 1437 |
| NO: 318) | | |
| HUMLYSYL_PEA_1_T19 (SEQ ID | 1306 | 1431 |
| NO: 319) | | |
| HUMLYSYL_PEA_1_T20 (SEQ ID | 1306 | 1431 |
| NO: 320) | | |
| HUMLYSYL_PEA_1_T22 (SEQ ID | 1306 | 1431 |
| NO: 321) | | |

[1153] Segment cluster HUMLYSYL_PEA_{—}1_node_{—}55 (SEQ ID NO:327) according to the present invention is supported by 149 libraries. The number of libraries was determined as previously described. This segment can be found in the following transcript(s): HUMLYSYL_PEA_{—}1_T2 (SEQ ID NO:313), HUMLYSYL_PEA_{—}1_T4 (SEQ ID NO:314), HUMLYSYL_PEA_{—}1_T5 (SEQ ID NO:315), HUMLYSYL_PEA_{—}1_T6 (SEQ ID NO:316), HUMLYSYL_PEA_{—}1_T8 (SEQ ID NO:317) and HUMLYSYL_PEA_{—}1_T9 (SEQ ID NO:318). Table 38 below describes the starting and ending position of this segment on each transcript.

TABLE 38
Segment location on transcripts

| | Segment | Segment |
|---|---|---|
| Transcript name | starting position | ending position |
| HUMLYSYL_PEA_1_T2 (SEQ ID | 1912 | 2040 |
| NO: 313) | | |
| HUMLYSYL_PEA_1_T4 (SEQ ID | 2000 | 2128 |
| NO: 314) | | |
| HUMLYSYL_PEA_1_T5 (SEQ ID | 1784 | 1912 |
| NO: 315) | | |
| HUMLYSYL_PEA_1_T6 (SEQ ID | 1886 | 2014 |
| NO: 316) | | |
| HUMLYSYL_PEA_1_T8 (SEQ ID | 2115 | 2243 |
| NO: 317) | | |
| HUMLYSYL_PEA_1_T9 (SEQ ID | 1865 | 1993 |
| NO: 318) | | |

[1154] Segment cluster HUMLYSYL_PEA_{—}1_node_{—}59 (SEQ ID NO:328) according to the present invention is supported by 161 libraries. The number of libraries was determined as previously described. This segment can be found in the following transcript(s): HUMLYSYL_PEA_{—}1_T2 (SEQ ID NO:313), HUMLYSYL_PEA_{—}1_T4 (SEQ ID NO:314), HUMLYSYL_PEA_{—}1_T5 (SEQ ID NO:315), HUMLYSYL_PEA_{—}1_T6 (SEQ ID NO:316), HUMLYSYL_PEA_{—}1_T8 (SEQ ID NO:317) and HUMLYSYL_PEA_{—}1_T9 (SEQ ID NO:318). Table 39 below describes the starting and ending position of this segment on each transcript.

TABLE 39
Segment location on transcripts

| | Segment | Segment |
|---|---|---|
| Transcript name | starting position | ending position |
| HUMLYSYL_PEA_1_T2 (SEQ ID | 2059 | 2184 |
| NO: 313) | | |
| HUMLYSYL_PEA_1_T4 (SEQ ID | 2147 | 2272 |
| NO: 314) | | |
| HUMLYSYL_PEA_1_T5 (SEQ ID | 1931 | 2056 |
| NO: 315) | | |
| HUMLYSYL_PEA_1_T6 (SEQ ID | 2033 | 2158 |
| NO: 316) | | |
| HUMLYSYL_PEA_1_T8 (SEQ ID | 2262 | 2387 |
| NO: 317) | | |
| HUMLYSYL_PEA_1_T9 (SEQ ID | 2012 | 2137 |
| NO: 318) | | |

[1155] Segment cluster HUMLYSYL_PEA_{—}1_node_{—}61 (SEQ ID NO:329) according to the present invention is supported by 196 libraries. The number of libraries was determined as previously described. This segment can be found in the following transcript(s): HUMLYSYL_PEA_{—}1_T2 (SEQ ID NO:313), HUMLYSYL_PEA_{—}1_T4 (SEQ ID NO:314), HUMLYSYL_PEA_{—}1_T5 (SEQ ID NO:315), HUMLYSYL_PEA_{—}1_T6 (SEQ ID NO:316), HUMLYSYL_PEA_T8 (SEQ ID NO:317) and HUMLYSYL_PEA_{—}1_T9 (SEQ ID NO:318). Table 40 below describes the starting and ending position of this segment on each transcript.

TABLE 40
Segment location on transcripts

| | Segment | Segment |
|---|---|---|
| Transcript name | starting position | ending position |
| HUMLYSYL_PEA_1_T2 (SEQ ID | 2185 | 2350 |
| NO: 313) | | |
| HUMLYSYL_PEA_1_T4 (SEQ ID | 2273 | 2438 |
| NO: 314) | | |
| HUMLYSYL_PEA_1_T5 (SEQ ID | 2057 | 2222 |
| NO: 315) | | |
| HUMLYSYL_PEA_1_T6 (SEQ ID | 2159 | 2324 |
| NO: 316) | | |
| HUMLYSYL_PEA_1_T8 (SEQ ID | 2388 | 2553 |
| NO: 317) | | |
| HUMLYSYL_PEA_1_T9 (SEQ ID | 2138 | 2303 |
| NO: 318) | | |

[1156] Segment cluster HUMLYSYL_PEA_{—}1_node_{—}62 (SEQ ID NO:330) according to the present invention is supported by 275 libraries. The number of libraries was determined as previously described. This segment can be found in the following transcript(s): HUMLYSYL_PEA_{—}1_T2 (SEQ ID NO:313), HUMLYSYL_PEA_{—}1_T4 (SEQ ID NO:314), HUMLYSYL_PEA_{—}1_T5 (SEQ ID NO:315), HUMLYSYL_PEA_{—}1_T6 (SEQ ID NO:316), HUMLYSYL_PEA_{—}1_T8 (SEQ ID NO:317), HUMLYSYL_PEA_{—}_T9 (SEQ ID NO:318) and HUMLYSYL_PEA_{—}1_T24 (SEQ ID NO:322). Table 41 below describes the starting and ending position of this segment on each transcript.

TABLE 41
Segment location on transcripts

| | | Segment |
|---|---|---|
| | Segment | ending |
| Transcript name | starting position | position |
| HUMLYSYL_PEA_1_T2 (SEQ ID | 2351 | 2622 |
| NO: 313) | | |
| HUMLYSYL_PEA_1_T4 (SEQ ID | 2439 | 2710 |
| NO: 314) | | |
| HUMLYSYL_PEA_1_T5 (SEQ ID | 2223 | 2494 |
| NO: 315) | | |
| HUMLYSYL_PEA_1_T6 (SEQ ID | 2325 | 2596 |
| NO: 316) | | |
| HUMLYSYL_PEA_1_T8 (SEQ ID | 2554 | 2825 |
| NO: 317) | | |
| HUMLYSYL_PEA_1_T9 (SEQ ID | 2304 | 2575 |
| NO: 318) | | |
| HUMLYSYL_PEA_1_T24 (SEQ ID | 272 | 543 |
| NO: 322) | | |

[1157] Segment cluster HUMLYSYL_PEA_{—}1_node_{—}65 (SEQ ID NO:331) according to the present invention is supported by 233 libraries. The number of libraries was determined as previously described. This segment can be found in the following transcript(s): HUMLYSYL_PEA_{—}1_T2 (SEQ ID NO:313), HUMLYSYL_PEA_{—}1_T4 (SEQ ID NO:314), HUMLYSYL_PEA_{—}1_T5 (SEQ ID NO:315), HUMLYSYL_PEA_{—}1_T6 (SEQ ID NO:316), HUMLYSYL_PEA_{—}1_T8 (SEQ ID NO:317), HUMLYSYL_PEA_{—}1_T9 (SEQ ID NO:318) and HUMLYSYL_PEA_{—}1_T24 (SEQ ID NO:322). Table 42 below describes the starting and ending position of this segment on each transcript.

TABLE 42
Segment location on transcripts

| | | Segment |
|---|---|---|
| | Segment | ending |
| Transcript name | starting position | position |
| HUMLYSYL_PEA_1_T2 (SEQ ID | 2675 | 2814 |
| NO: 313) | | |
| HUMLYSYL_PEA_1_T4 (SEQ ID | 2763 | 2902 |
| NO: 314) | | |
| HUMLYSYL_PEA_1_T5 (SEQ ID | 2547 | 2686 |
| NO: 315) | | |
| HUMLYSYL_PEA_1_T6 (SEQ ID | 2649 | 2788 |
| NO: 316) | | |
| HUMLYSYL_PEA_1_T8 (SEQ ID | 2878 | 3017 |
| NO: 317) | | |
| HUMLYSYL_PEA_1_T9 (SEQ ID | 2628 | 2767 |
| NO: 318) | | |
| HUMLYSYL_PEA_1_T24 (SEQ ID | 596 | 735 |
| NO: 322) | | |

[1158] Segment cluster HUMLYSYL_PEA_{—}1_node_{—}71 (SEQ ID NO:332) according to the present invention is supported by 187 libraries. The number of libraries was determined as previously described. This segment can be found in the following transcript(s): HUMLYSYL_PEA_{—}1_T2 (SEQ ID NO:313), HUMLYSYL_PEA_{—}1_T4 (SEQ ID NO:314), HUMLYSYL_PEA_{—}1_T5 (SEQ ID NO:315), HUMLYSYL_PEA_{—}1_T6 (SEQ ID NO:316), HUMLYSYL_PEA_{—}1_T8 (SEQ ID NO:317), HUMLYSYL_PEA_{—}1_T9 (SEQ ID NO:318), HUMLYSYL_PEA_{—}1_T19 (SEQ ID NO:319), HUMLYSYL_PEA_{—}1_T20 (SEQ ID NO:320) and HUMLYSYL_PEA_{—}1_T24 (SEQ ID NO:322). Table 43 below describes the starting and ending position of this segment on each transcript.

TABLE 43
Segment location on transcripts

| | Segment | |
|---|---|---|
| | starting | Segment |
| Transcript name | position | ending position |
| HUMLYSYL_PEA_1_T2 (SEQ ID | 2895 | 3027 |
| NO: 313) | | |
| HUMLYSYL_PEA_1_T4 (SEQ ID | 2983 | 3115 |
| NO: 314) | | |
| HUMLYSYL_PEA_1_T5 (SEQ ID | 2767 | 2899 |
| NO: 315) | | |
| HUMLYSYL_PEA_1_T6 (SEQ ID | 2869 | 3001 |
| NO: 316) | | |
| HUMLYSYL_PEA_1_T8 (SEQ ID | 3098 | 3230 |
| NO: 317) | | |
| HUMLYSYL_PEA_1_T9 (SEQ ID | 2848 | 2980 |
| NO: 318) | | |
| HUMLYSYL_PEA_1_T19 (SEQ ID | 1939 | 2071 |
| NO: 319) | | |
| HUMLYSYL_PEA_1_T20 (SEQ ID | 1872 | 2004 |
| NO: 320) | | |
| HUMLYSYL_PEA_1_T24 (SEQ ID | 816 | 948 |
| NO: 322) | | |

[1159] Segment cluster HUMLYSYL_PEA_{—}1_node_{—}72 (SEQ ID NO:333) according to the present invention is supported by 143 libraries. The number of libraries was determined as previously described. This segment can be found in the following transcript(s): HUMLYSYL_PEA_{—}1_T2 (SEQ ID NO:313), HUMLYSYL_PEA_{—}1_T4 (SEQ ID NO:314), HUMLYSYL_PEA_{—}1_T5 (SEQ ID NO:315), HUMLYSYL_PEA_{—}1_T6 (SEQ ID NO:316), HUMLYSYL_PEA_{—}1_T8 (SEQ ID NO:317), HUMLYSYL_PEA_{—}1_T9 (SEQ ID NO:318), HUMLYSYL_PEA_{—}1_T19 (SEQ ID NO:319), HUMLYSYL_PEA_{—}1_T20 (SEQ ID NO:320) and HUMLYSYL_PEA_{—}1_T24 (SEQ ID NO:322). Table 44 below describes the starting and ending position of this segment on each transcript.

TABLE 44
Segment location on transcripts

| | Segment | |
|---|---|---|
| | starting | Segment |
| Transcript name | position | ending position |
| HUMLYSYL_PEA_1_T2 (SEQ ID | 3028 | 3069 |
| NO: 313) | | |
| HUMLYSYL_PEA_1_T4 (SEQ ID | 3116 | 3157 |
| NO: 314) | | |
| HUMLYSYL_PEA_1_T5 (SEQ ID | 2900 | 2941 |
| NO: 315) | | |
| HUMLYSYL_PEA_1_T6 (SEQ ID | 3002 | 3043 |
| NO: 316) | | |
| HUMLYSYL_PEA_1_T8 (SEQ ID | 3231 | 3272 |
| NO: 317) | | |
| HUMLYSYL_PEA_1_T9 (SEQ ID | 2981 | 3022 |
| NO: 318) | | |
| HUMLYSYL_PEA_1_T19 (SEQ ID | 2072 | 2113 |
| NO: 319) | | |
| HUMLYSYL_PEA_1_T20 (SEQ ID | 2005 | 2046 |
| NO: 320) | | |
| HUMLYSYL_PEA_1_T24 (SEQ ID | 949 | 990 |
| NO: 322) | | |

[1160] According to an optional embodiment of the present invention, short segments related to the above cluster are also provided. These segments are up to about 120 bp in length, and so are included in a separate description.

[1161] Segment cluster HUMLYSYL_PEA_{—}1_node_{—}3 (SEQ ID NO:334) according to the present invention is supported by 68 libraries. The number of libraries was determined as previously described. This segment can be found in the following transcript(s): HUMLYSYL_PEA_{—}1_T2 (SEQ ID NO:313), HUMLYSYL_PEA_{—}1_T4 (SEQ ID NO:314), HUMLYSYL_PEA_{—}1_T5 (SEQ ID NO:315), HUMLYSYL_PEA_{—}1_T6 (SEQ ID NO:316), HUMLYSYL_PEA_{—}1_T8 (SEQ ID NO:317), HUMLYSYL_PEA_{—}1_T9 (SEQ ID NO:318), HUMLYSYL-PEA-1_T19 (SEQ ID NO:319), HUMLYSYL PEA_{—}1_T20 (SEQ ID NO:320), HUMLYSYL_PEA_{—}1_T22 (SEQ ID NO:321) and HUMLYSYL_PEA_{—}1_T24 (SEQ ID NO:322). Table 45 below describes the starting and ending position of this segment on each transcript.

TABLE 45
Segment location on transcripts

| | Segment | |
|---|---|---|
| | starting | Segment |
| Transcript name | position | ending position |
| HUMLYSYL_PEA_1_T2 (SEQ ID | 1 | 76 |
| NO: 313) | | |
| HUMLYSYL_PEA_1_T4 (SEQ ID | 1 | 76 |
| NO: 314) | | |
| HUMLYSYL_PEA_1_T5 (SEQ ID | 1 | 76 |
| NO: 315) | | |
| HUMLYSYL_PEA_1_T6 (SEQ ID | 1 | 76 |
| NO: 316) | | |
| HUMLYSYL_PEA_1_T8 (SEQ ID | 1 | 76 |
| NO: 317) | | |
| HUMLYSYL_PEA_1_T9 (SEQ ID | 1 | 76 |
| NO: 318) | | |
| HUMLYSYL_PEA_1_T19 (SEQ ID | 1 | 76 |
| NO: 319) | | |
| HUMLYSYL_PEA_1_T20 (SEQ ID | 1 | 76 |
| NO: 320) | | |
| HUMLYSYL_PEA_1_T22 (SEQ ID | 1 | 76 |
| NO: 321) | | |
| HUMLYSYL_PEA_1_T24 (SEQ ID | 1 | 76 |
| NO: 322) | | |

[1162] Segment cluster HUMLYSYL_PEA_{—}1_node_{—}4 (SEQ ID NO:335) according to the present invention is supported by 99 libraries. The number of libraries was determined as previously described. This segment can be found in the following transcript(s): HUMLYSYL_PEA_{—}1_T2 (SEQ ID NO:313), HUMLYSYL_PEA_{—}1_T4 (SEQ ID NO:314), HUMLYSYL_PEA_{—}1_T5 (SEQ ID NO:315), HUMLYSYL_PEA_{—}1_T6 (SEQ ID NO:316), HUMLYSYL_PEA_{—}1_T8 (SEQ ID NO:317), HUMLYSYL_PEA_{—}1_T9 (SEQ ID NO:318), HUMLYSYL_PEA_{—}1_T19 (SEQ ID NO:319), HUMLYSYL_PEA_{—}1_T20 (SEQ ID NO:320), HUMLYSYL_PEA_{—}1_T22 (SEQ ID NO:321) and HUMLYSYL_PEA_{—}1_T24 (SEQ ID NO:322). Table 46 below describes the starting and ending position of this segment on each transcript.

TABLE 46
Segment location on transcripts

| | | |
|---|---|---|
| | Segment | |
| | starting | Segment |
| Transcript name | position | ending position |

| | | |
|---|---|---|
| HUMLYSYL_PEA_1_T2 (SEQ ID | 77 | 179 |
| NO: 313) | | |
| HUMLYSYL_PEA_1_T4 (SEQ ID | 77 | 179 |
| NO: 314) | | |
| HUMLYSYL_PEA_1_T5 (SEQ ID | 77 | 179 |
| NO: 315) | | |
| HUMLYSYL_PEA_1_T6 (SEQ ID | 77 | 179 |
| NO: 316) | | |
| HUMLYSYL_PEA_1_T8 (SEQ ID | 77 | 179 |
| NO: 317) | | |
| HUMLYSYL_PEA_1_T9 (SEQ ID | 77 | 179 |
| NO: 318) | | |
| HUMLYSYL_PEA_1_T19 (SEQ ID | 77 | 179 |
| NO: 319) | | |
| HUMLYSYL_PEA_1_T20 (SEQ ID | 77 | 179 |
| NO: 320) | | |
| HUMLYSYL_PEA_1_T22 (SEQ ID | 77 | 179 |
| NO: 321) | | |
| HUMLYSYL_PEA_1_T24 (SEQ ID | 77 | 179 |
| NO: 322) | | |

[1163] Segment cluster HUMLYSYL_PEA_{—}1_node_{—}8 (SEQ ID NO:336) according to the present invention is supported by 108 libraries. The number of libraries was determined as previously described. This segment can be found in the following transcript(s): HUMLYSYL_PEA_{—}1_T2 (SEQ ID NO:313), HUMLYSYL_PEA_{—}1_T4 (SEQ ID NO:314), HUMLYSYL_PEA_{—}1_T5 (SEQ ID NO:315), HUMLYSYL_PEA_{—}1_T6 (SEQ ID NO:316), HUMLYSYL_PEA_{—}1_T8 (SEQ ID NO:317), HUMLYSYL_PEA_{—}1_T9 (SEQ ID NO:318), HUMLYSYL_PEA_{—}1_T19 (SEQ ID NO:319), HUMLYSYL_PEA_{—}1_T20 (SEQ ID NO:320), HUMLYSYL_PEA_{—}1_T22 (SEQ ID NO:321) and HUMLYSYL_PEA_{—}1_T24 (SEQ ID NO:322). Table 47 below describes the starting and ending position of this segment on each transcript.

TABLE 47
Segment location on transcripts

| | Segment | |
|---|---|---|
| | starting | Segment |
| Transcript name | position | ending position |
| HUMLYSYL_PEA_1_T2 (SEQ ID | 180 | 271 |
| NO: 313) | | |
| HUMLYSYL_PEA_1_T4 (SEQ ID | 321 | 412 |
| NO: 314) | | |
| HUMLYSYL_PEA_1_T5 (SEQ ID | 180 | 271 |
| NO: 315) | | |
| HUMLYSYL_PEA_1_T6 (SEQ ID | 180 | 271 |
| NO: 316) | | |
| HUMLYSYL_PEA_1_T8 (SEQ ID | 180 | 271 |
| NO: 317) | | |
| HUMLYSYL_PEA_1_T9 (SEQ ID | 180 | 271 |
| NO: 318) | | |
| HUMLYSYL_PEA_1_T19 (SEQ ID | 180 | 271 |
| NO: 319) | | |
| HUMLYSYL_PEA_1_T20 (SEQ ID | 180 | 271 |
| NO: 320) | | |
| HUMLYSYL_PEA_1_T22 (SEQ ID | 180 | 271 |
| NO: 321) | | |
| HUMLYSYL_PEA_1_T24 (SEQ ID | 180 | 271 |
| NO: 322) | | |

[1164] Segment cluster HUMLYSYL_PEA_{—}1_node_{—}10 (SEQ ID NO:337) according to the present invention is supported by 1 libraries. The number of libraries was determined as previously described. This segment can be found in the following transcript(s): HUMLYSYL_PEA_{—}1_T6 (SEQ ID NO:316). Table 48 below describes the starting and ending position of this segment on each transcript.

TABLE 48
Segment location on transcripts

| | Segment | Segment |
|---|---|---|
| Transcript name | starting position | ending position |
| HUMLYSYL_PEA_1_T6 (SEQ ID | 272 | 298 |
| NO: 316) | | |

[1165] Segment cluster HUMLYSYL_PEA_{—}1_node_{—}11 (SEQ ID NO:338) according to the present invention is supported by 120 libraries. The number of libraries was determined as previously described. This segment can be found in the following transcript(s): HUMLYSYL_PEA_{—}1_T2 (SEQ ID NO:313), HUMLYSYL_PEA_{—}1_T4 (SEQ ID NO:314), HUMLYSYL_PEA_{—}1_T5 (SEQ ID NO:315), HUMLYSYL_PEA_{—}1_T6 (SEQ ID NO:316), HUMLYSYL_PEA_{—}1_T8 (SEQ ID NO:317), HUMLYSYL_PEA_{—}1_T9 (SEQ ID NO:318), HUMLYSYL_PEA_{—}1_T19 (SEQ ID NO:319), HUMLYSYL_PEA_{—}1_T20 (SEQ ID NO:320) and HUMLYSYL_PEA_{—}1_T22 (SEQ ID NO:321). Table 49 below describes the starting and ending position of this segment on each transcript.

TABLE 49
Segment location on transcripts

| | Segment | |
|---|---|---|
| | starting | Segment |
| Transcript name | position | ending position |
| HUMLYSYL_PEA_1_T2 (SEQ ID | 272 | 355 |
| NO: 313) | | |
| HUMLYSYL_PEA_1_T4 (SEQ ID | 413 | 496 |
| NO: 314) | | |
| HUMLYSYL_PEA_1_T5 (SEQ ID | 272 | 355 |
| NO: 315) | | |
| HUMLYSYL_PEA_1_T6 (SEQ ID | 299 | 382 |
| NO: 316) | | |
| HUMLYSYL_PEA_1_T8 (SEQ ID | 272 | 355 |
| NO: 317) | | |
| HUMLYSYL_PEA_1_T9 (SEQ ID | 272 | 355 |
| NO: 318) | | |
| HUMLYSYL_PEA_1_T19 (SEQ ID | 272 | 355 |
| NO: 319) | | |
| HUMLYSYL_PEA_1_T20 (SEQ ID | 272 | 355 |
| NO: 320) | | |
| HUMLYSYL_PEA_1_T22 (SEQ ID | 272 | 355 |
| NO: 321) | | |

[1166] Segment cluster HUMLYSYL_PEA_{—}1_node_{—}12 (SEQ ID NO:339) according to the present invention is supported by 111 libraries. The number of libraries was determined as previously described. This segment can be found in the following transcript(s): HUMLYSYL_PEA_T2 (SEQ ID NO:313), HUMLYSYL PEA_{—}1_T4 (SEQ ID NO:314), HUMLYSYL_PEA_{—}1_T5 (SEQ ID NO:315), HUMLYSYL_PEA_{—}1_T6 (SEQ ID NO:316), HUMLYSYL_PEA_{—}1_T8 (SEQ ID NO:317), HUMLYSYL_PEA_{—}1_T9 (SEQ ID NO:318), HUMLYSYL_PEA_{—}1_T19 (SEQ ID NO:319), HUMLYSYL_PEA_{—}1_T20 (SEQ ID NO:320) and HUMLYSYL_PEA_{—}1_T22 (SEQ ID NO:321). Table 50 below describes the starting and ending position of this segment on each transcript.

TABLE 50
Segment location on transcripts

| | Segment | |
|---|---|---|
| | starting | Segment |
| Transcript name | position | ending position |
| HUMLYSYL_PEA_1_T2 (SEQ ID | 356 | 405 |
| NO: 313) | | |
| HUMLYSYL_PEA_1_T4 (SEQ ID | 497 | 546 |
| NO: 314) | | |
| HUMLYSYL_PEA_1_T5 (SEQ ID | 356 | 405 |
| NO: 315) | | |
| HUMLYSYL_PEA_1_T6 (SEQ ID | 383 | 432 |
| NO: 316) | | |
| HUMLYSYL_PEA_1_T8 (SEQ ID | 356 | 405 |
| NO: 317) | | |
| HUMLYSYL_PEA_1_T9 (SEQ ID | 356 | 405 |
| NO: 318) | | |
| HUMLYSYL_PEA_1_T19 (SEQ ID | 356 | 405 |
| NO: 319) | | |
| HUMLYSYL_PEA_1_T20 (SEQ ID | 356 | 405 |
| NO: 320) | | |
| HUMLYSYL_PEA_1_T22 (SEQ ID | 356 | 405 |
| NO: 321) | | |

[1167] Segment cluster HUMLYSYL_PEA_{—}1_node_{—}16 (SEQ ID NO:340) according to the present invention is supported by 127 libraries. The number of libraries was determined as previously described. This segment can be found in the following transcript(s): HUMLYSYL_PEA_{—}1_T2 (SEQ ID NO:313), HUMLYSYL_PEA_{—}1_T4 (SEQ ID NO:314), HUMLYSYL_PEA_{—}1_T5 (SEQ ID NO:315), HUMLYSYL_PEA_{—}1_T6 (SEQ ID NO:316), HUMLYSYL_PEA_{—}1_T8 (SEQ ID NO:317), HUMLYSYL_PEA_{—}1_T9 (SEQ ID NO:318), HUMLYSYL_PEA_{—}1_T19 (SEQ ID NO:319), HUMLYSYL_PEA_{—}1_T20 (SEQ ID NO:320) and HUMLYSYL_PEA_{—}1_T22 (SEQ ID NO:321). Table 51 below describes the starting and ending position of this segment on each transcript.

TABLE 51
Segment location on transcripts

| | Segment | |
|---|---|---|
| | starting | Segment |
| Transcript name | position | ending position |
| HUMLYSYL_PEA_1_T2 (SEQ ID | 570 | 682 |
| NO: 313) | | |
| HUMLYSYL_PEA_1_T4 (SEQ ID | 711 | 823 |
| NO: 314) | | |
| HUMLYSYL_PEA_1_T5 (SEQ ID | 570 | 682 |
| NO: 315) | | |
| HUMLYSYL_PEA_1_T6 (SEQ ID | 597 | 709 |
| NO: 316) | | |
| HUMLYSYL_PEA_1_T8 (SEQ ID | 570 | 682 |
| NO: 317) | | |
| HUMLYSYL_PEA_1_T9 (SEQ ID | 570 | 682 |
| NO: 318) | | |
| HUMLYSYL_PEA_1_T19 (SEQ ID | 570 | 682 |
| NO: 319) | | |
| HUMLYSYL_PEA_1_T20 (SEQ ID | 570 | 682 |
| NO: 320) | | |
| HUMLYSYL_PEA_1_T22 (SEQ ID | 570 | 682 |
| NO: 321) | | |

[1168] Segment cluster HUMLYSYL_PEA_{—}1_node_{—}20 (SEQ ID NO:341) according to the present invention is supported by 107 libraries. The number of libraries was determined as previously described. This segment can be found in the following transcript(s): HUMLYSYL_PEA_{—}1_T2 (SEQ ID NO:313), HUMLYSYL_PEA_{—}1_T4 (SEQ ID NO:314), HUMLYSYL_PEA_{—}1_T5 (SEQ ID NO:315), HUMLYSYL_PEA_{—}1_T6 (SEQ ID NO:316), HUMLYSYL_PEA_{—}1_T8 (SEQ ID NO:317), HUMLYSYL_PEA_{—}1_T9 (SEQ ID NO:318), HUMLYSYL_PEA_{—}1_T19 (SEQ ID NO:319), HUMLYSYL_PEA_{—}1_T20 (SEQ ID NO:320) and HUMLYSYL_PEA_{—}1_T22 (SEQ ID NO:321). Table 52 below describes the starting and ending position of this segment on each transcript.

TABLE 52
Segment location on transcripts

| | Segment | |
|---|---|---|
| | starting | Segment |
| Transcript name | position | ending position |
| HUMLYSYL_PEA_1_T2 (SEQ ID | 683 | 746 |
| NO: 313) | | |
| HUMLYSYL_PEA_1_T4 (SEQ ID | 824 | 887 |
| NO: 314) | | |
| HUMLYSYL_PEA_1_T5 (SEQ ID | 683 | 746 |
| NO: 315) | | |
| HUMLYSYL_PEA_1_T6 (SEQ ID | 710 | 773 |
| NO: 316) | | |
| HUMLYSYL_PEA_1_T8 (SEQ ID | 939 | 1002 |
| NO: 317) | | |
| HUMLYSYL_PEA_1_T9 (SEQ ID | 683 | 746 |
| NO: 318) | | |
| HUMLYSYL_PEA_1_T19 (SEQ ID | 683 | 746 |
| NO: 319) | | |
| HUMLYSYL_PEA_1_T20 (SEQ ID | 683 | 746 |
| NO: 320) | | |
| HUMLYSYL_PEA_1_T22 (SEQ ID | 683 | 746 |
| NO: 321) | | |

[1169] Segment cluster HUMLYSYL_PEA_{—}1_node_{—}23 (SEQ ID NO:342) according to the present invention is supported by 111 libraries. The number of libraries was determined as previously described. This segment can be found in the following transcript(s): HUMLYSYL_PEA_{—}1_T2 (SEQ ID NO:313), HUMLYSYL_PEA_{—}1_T4 (SEQ ID NO:314), HUMLYSYL_PEA_{—}1_T5 (SEQ ID NO:315), HUMLYSYL_PEA_{—}1_T6 (SEQ ID NO:316), HUMLYSYL_PEA_{—}1_T8 (SEQ ID NO:317), HUMLYSYL_PEA_{—}1_T19 (SEQ ID NO:319), HUMLYSYL_PEA_{—}1_T20 (SEQ ID NO:320) and HUMLYSYL_PEA_{—}1_T22 (SEQ ID NO:321). Table 53 below describes the starting and ending position of this segment on each transcript.

TABLE 53
Segment location on transcripts

| | Segment | |
|---|---|---|
| | starting | Segment |
| Transcript name | position | ending position |
| HUMLYSYL_PEA_1_T2 (SEQ ID | 747 | 844 |
| NO: 313) | | |
| HUMLYSYL_PEA_1_T4 (SEQ ID | 888 | 985 |
| NO: 314) | | |
| HUMLYSYL_PEA_1_T5 (SEQ ID | 747 | 844 |
| NO: 315) | | |
| HUMLYSYL_PEA_1_T6 (SEQ ID | 774 | 871 |
| NO: 316) | | |
| HUMLYSYL_PEA_1_T8 (SEQ ID | 1003 | 1100 |
| NO: 317) | | |
| HUMLYSYL_PEA_1_T19 (SEQ ID | 747 | 844 |
| NO: 319) | | |
| HUMLYSYL_PEA_1_T20 (SEQ ID | 747 | 844 |
| NO: 320) | | |
| HUMLYSYL_PEA_1_T22 (SEQ ID | 747 | 844 |
| NO: 321) | | |

[1170] Segment cluster HUMLYSYL_PEA_{—}1_node_{—}25 (SEQ ID NO:343) according to the present invention is supported by 1 libraries. The number of libraries was determined as previously described. This segment can be found in the following transcript(s): HUMLYSYL_PEA_{—}1_T9 (SEQ ID NO:318). Table 54 below describes the starting and ending position of this segment on each transcript.

TABLE 54
Segment location on transcripts

| | Segment | |
|---|---|---|
| | starting | Segment |
| Transcript name | position | ending position |
| HUMLYSYL_PEA_1_T9 (SEQ ID | 747 | 850 |
| NO: 318) | | |

[1171] Segment cluster HUMLYSYL_PEA_{—}1_node_{—}28 (SEQ ID NO:344) according to the present invention is supported by 105 libraries. The number of libraries was determined as previously described. This segment can be found in the following transcript(s): HUMLYSYL_PEA_{—}1_T2 (SEQ ID NO:313), HUMLYSYL_PEA_{—}1_T4 (SEQ ID NO:314), HUMLYSYL_PEA_{—}1_T5 (SEQ ID NO:315), HUMLYSYL_PEA_{—}1_T6 (SEQ ID NO:316), HUMLYSYL_PEA_{—}1_T8 (SEQ ID NO:317), HUMLYSYL_PEA_{—}1_T9 (SEQ ID NO:318), HUMLYSYL_PEA_{—}1_T19 (SEQ ID NO:319), HUMLYSYL_PEA_{—}1_T20 (SEQ ID NO:320) and HUMLYSYL_PEA_{—}1_T22 (SEQ ID NO:321). Table 55 below describes the starting and ending position of this segment on each transcript.

TABLE 55
Segment location on transcripts

| | Segment | |
|---|---|---|
| | starting | Segment |
| Transcript name | position | ending position |
| HUMLYSYL_PEA_1_T2 (SEQ ID | 845 | 946 |
| NO: 313) | | |
| HUMLYSYL_PEA_1_T4 (SEQ ID | 986 | 1087 |
| NO: 314) | | |
| HUMLYSYL_PEA_1_T5 (SEQ ID | 845 | 946 |
| NO: 315) | | |
| HUMLYSYL_PEA_1_T6 (SEQ ID | 872 | 973 |
| NO: 316) | | |
| HUMLYSYL_PEA_1_T8 (SEQ ID | 1101 | 1202 |
| NO: 317) | | |
| HUMLYSYL_PEA_1_T9 (SEQ ID | 851 | 952 |
| NO: 318) | | |
| HUMLYSYL_PEA_1_T19 (SEQ ID | 845 | 946 |
| NO: 319) | | |
| HUMLYSYL_PEA_1_T20 (SEQ ID | 845 | 946 |
| NO: 320) | | |
| HUMLYSYL_PEA_1_T22 (SEQ ID | 845 | 946 |
| NO: 321) | | |

[1172] Segment cluster HUMLYSYL_PEA_{—}1_node_{—}30 (SEQ ID NO:345) according to the present invention is supported by 86 libraries. The number of libraries was determined as previously described. This segment can be found in the following transcript(s): HUMLYSYL_PEA_{—}1_T2 (SEQ ID NO:313), HUMLYSYL_PEA_{—}1_T4 (SEQ ID NO:314), HUMLYSYL_PEA_{—}1_T6 (SEQ ID NO:316), HUMLYSYL_PEA_{—}1_T8 (SEQ ID NO:317), HUMLYSYL_PEA_{—}1_T9 (SEQ ID NO:318), HUMLYSYL_PEA_{—}1_T19 (SEQ ID NO:319), HUMLYSYL_PEA_{—}1_T20 (SEQ ID NO:320) and HUMLYSYL_PEA_{—}1_T22 (SEQ ID NO:321). Table 56 below describes the starting and ending position of this segment on each transcript.

TABLE 56
Segment location on transcripts

| | Segment | |
|---|---|---|
| | starting | Segment |
| Transcript name | position | ending position |
| HUMLYSYL_PEA_1_T2 (SEQ ID | 947 | 1021 |
| NO: 313) | | |
| HUMLYSYL_PEA_1_T4 (SEQ ID | 1088 | 1162 |
| NO: 314) | | |
| HUMLYSYL_PEA_1_T6 (SEQ ID | 974 | 1048 |
| NO: 316) | | |
| HUMLYSYL_PEA_1_T8 (SEQ ID | 1203 | 1277 |
| NO: 317) | | |
| HUMLYSYL_PEA_1_T9 (SEQ ID | 953 | 1027 |
| NO: 318) | | |
| HUMLYSYL_PEA_1_T19 (SEQ ID | 947 | 1021 |
| NO: 319) | | |
| HUMLYSYL_PEA_1_T20 (SEQ ID | 947 | 1021 |
| NO: 320) | | |
| HUMLYSYL_PEA_1_T22 (SEQ ID | 947 | 1021 |
| NO: 321) | | |

[1173] Segment cluster HUMLYSYL_PEA_{—}1_node_{—}31 (SEQ ID NO:346) according to the present invention is supported by 79 libraries. The number of libraries was determined as previously described. This segment can be found in the following transcript(s): HUMLYSYL_PEA_{—}1_T2 (SEQ ID NO:313), HUMLYSYL_PEA_{—}1_T4 (SEQ ID NO:314), HUMLYSYL_PEA_{—}1_T5 (SEQ ID NO:315), HUMLYSYL_PEA_{—}1_T6 (SEQ ID NO:316), HUMLYSYL_PEA_T8 (SEQ ID NO:317), HUMLYSYL_PEA_{—}1_T9 (SEQ ID NO:318), HUMLYSYL_PEA_{—}1_T19 (SEQ ID NO:319), HUMLYSYL_PEA_{—}1_T20 (SEQ ID NO:320) and HUMLYSYL_PEA_{—}1_T22 (SEQ ID NO:321). Table 57 below describes the starting and ending position of this segment on each transcript.

TABLE 57
Segment location on transcripts

| | Segment | |
|---|---|---|
| | starting | Segment |
| Transcript name | position | ending position |
| HUMLYSYL_PEA_1_T2 (SEQ ID | 1022 | 1078 |
| NO: 313) | | |
| HUMLYSYL_PEA_1_T4 (SEQ ID | 1163 | 1219 |
| NO: 314) | | |
| HUMLYSYL_PEA_1_T5 (SEQ ID | 947 | 1003 |
| NO: 315) | | |
| HUMLYSYL_PEA_1_T6 (SEQ ID | 1049 | 1105 |
| NO: 316) | | |
| HUMLYSYL_PEA_1_T8 (SEQ ID | 1278 | 1334 |
| NO: 317) | | |
| HUMLYSYL_PEA_1_T9 (SEQ ID | 1028 | 1084 |
| NO: 318) | | |
| HUMLYSYL_PEA_1_T19 (SEQ ID | 1022 | 1078 |
| NO: 319) | | |
| HUMLYSYL_PEA_1_T20 (SEQ ID | 1022 | 1078 |
| NO: 320) | | |
| HUMLYSYL_PEA_1_T22 (SEQ ID | 1022 | 1078 |
| NO: 321) | | |

[1174] Segment cluster HUMLYSYL_PEA_{—}1_node_{—}33 (SEQ ID NO:347) according to the present invention is supported by 81 libraries. The number of libraries was determined as previously described. This segment can be found in the following transcript(s): HUMLYSYL_PEA_{—}1_T2 (SEQ ID NO:313), HUMLYSYL_PEA_{—}1_T4 (SEQ ID NO:314), HUMLYSYL_PEA_{—}1_T5 (SEQ ID NO:315), HUMLYSYL_PEA_{—}1_T6 (SEQ ID NO:316), HUMLYSYL_PEA_{—}1_T8 (SEQ ID NO:317), HUMLYSYL_PEA_{—}1_T9 (SEQ ID NO:318), HUMLYSYL_PEA_{—}1_T19 (SEQ ID NO:319), HUMLYSYL_PEA_{—}1_T20 (SEQ ID NO:320) and HUMLYSYL_PEA_{—}1_T22 (SEQ ID NO:321). Table 58 below describes the starting and ending position of this segment on each transcript.

TABLE 58
Segment location on transcripts

| | Segment | |
|---|---|---|
| | starting | Segment |
| Transcript name | position | ending position |
| HUMLYSYL_PEA_1_T2 (SEQ ID | 1079 | 1162 |
| NO: 313) | | |
| HUMLYSYL_PEA_1_T4 (SEQ ID | 1220 | 1303 |
| NO: 314) | | |
| HUMLYSYL_PEA_1_T5 (SEQ ID | 1004 | 1087 |
| NO: 315) | | |
| HUMLYSYL_PEA_1_T6 (SEQ ID | 1106 | 1189 |
| NO: 316) | | |
| HUMLYSYL_PEA_1_T8 (SEQ ID | 1335 | 1418 |
| NO: 317) | | |
| HUMLYSYL_PEA_1_T9 (SEQ ID | 1085 | 1168 |
| NO: 318) | | |
| HUMLYSYL_PEA_1_T19 (SEQ ID | 1079 | 1162 |
| NO: 319) | | |
| HUMLYSYL_PEA_1_T20 (SEQ ID | 1079 | 1162 |
| NO: 320) | | |
| HUMLYSYL_PEA_1_T22 (SEQ ID | 1079 | 1162 |
| NO: 321) | | |

[1175] Segment cluster HUMLYSYL_PEA_{—}1_node_{—}34 (SEQ ID NO:348) according to the present invention is supported by 74 libraries. The number of libraries was determined as previously described. This segment can be found in the following transcript(s): HUMLYSYL_PEA_{—}1_T2 (SEQ ID NO:313), HUMLYSYL_PEA_{—}1_T4 (SEQ ID NO:314), HUMLYSYL_PEA_{—}1_T5 (SEQ ID NO:315), HUMLYSYL_PEA_{—}1_T6 (SEQ ID NO:316), HUMLYSYL_PEA_{—}1_T8 (SEQ ID NO:317), HUMLYSYL_PEA_{—}1_T9 (SEQ ID NO:318), HUMLYSYL_PEA_{—}1_T19 (SEQ ID NO:319), HUMLYSYL_PEA_{—}1_T20 (SEQ ID NO:320) and HUMLYSYL_PEA_{—}1_T22 (SEQ ID NO:321). Table 59 below describes the starting and ending position of this segment on each transcript.

TABLE 59
Segment location on transcripts

| | Segment | |
|---|---|---|
| | starting | Segment |
| Transcript name | position | ending position |
| HUMLYSYL_PEA_1_T2 (SEQ ID | 1163 | 1200 |
| NO: 313) | | |
| HUMLYSYL_PEA_1_T4 (SEQ ID | 1304 | 1341 |
| NO: 314) | | |
| HUMLYSYL_PEA_1_T5 (SEQ ID | 1088 | 1125 |
| NO: 315) | | |
| HUMLYSYL_PEA_1_T6 (SEQ ID | 1190 | 1227 |
| NO: 316) | | |
| HUMLYSYL_PEA_1_T8 (SEQ ID | 1419 | 1456 |
| NO: 317) | | |
| HUMLYSYL_PEA_1_T9 (SEQ ID | 1169 | 1206 |
| NO: 318) | | |
| HUMLYSYL_PEA_1_T19 (SEQ ID | 1163 | 1200 |
| NO: 319) | | |
| HUMLYSYL_PEA_1_T20 (SEQ ID | 1163 | 1200 |
| NO: 320) | | |
| HUMLYSYL_PEA_1_T22 (SEQ ID | 1163 | 1200 |
| NO: 321) | | |

[1176] Segment cluster HUMLYSYL_PEA_{—}1_node_{—}36 (SEQ ID NO:349) according to the present invention is supported by 90 libraries. The number of libraries was determined as previously described. This segment can be found in the following transcript(s): HUMLYSYL_PEA_{—}1_T2 (SEQ ID NO:313), HUMLYSYL_PEA_{—}1_T4 (SEQ ID NO:314), HUMLYSYL_PEA_{—}1_T5 (SEQ ID NO:315), HUMLYSYL_PEA_{—}1_T6 (SEQ ID NO:316), HUMLYSYL_PEA_{—}1_T8 (SEQ ID NO:317), HUMLYSYL_PEA_{—}1_T9 (SEQ ID NO:318), HUMLYSYL_PEA_{—}1_T19 (SEQ ID NO:319), HUMLYSYL_PEA_{—}1_T20 (SEQ ID NO:320) and HUMLYSYL_PEA_{—}1_T22 (SEQ ID NO:321). Table 60 below describes the starting and ending position of this segment on each transcript.

TABLE 60
Segment location on transcripts

| | Segment | |
|---|---|---|
| | starting | Segment |
| Transcript name | position | ending position |
| HUMLYSYL_PEA_1_T2 (SEQ ID | 1201 | 1305 |
| NO: 313) | | |
| HUMLYSYL_PEA_1_T4 (SEQ ID | 1342 | 1446 |
| NO: 314) | | |
| HUMLYSYL_PEA_1_T5 (SEQ ID | 1126 | 1230 |
| NO: 315) | | |
| HUMLYSYL_PEA_1_T6 (SEQ ID | 1228 | 1332 |
| NO: 316) | | |
| HUMLYSYL_PEA_1_T8 (SEQ ID | 1457 | 1561 |
| NO: 317) | | |
| HUMLYSYL_PEA_1_T9 (SEQ ID | 1207 | 1311 |
| NO: 318) | | |
| HUMLYSYL_PEA_1_T19 (SEQ ID | 1201 | 1305 |
| NO: 319) | | |
| HUMLYSYL_PEA_1_T20 (SEQ ID | 1201 | 1305 |
| NO: 320) | | |
| HUMLYSYL_PEA_1_T22 (SEQ ID | 1201 | 1305 |
| NO: 321) | | |

[1177] Segment cluster HUMLYSYL_PEA_{—}1_node_{—}40 (SEQ ID NO:350) according to the present invention is supported by 96 libraries. The number of libraries was determined as previously described. This segment can be found in the following transcript(s): HUMLYSYL_PEA_{—}1_T2 (SEQ ID NO:313), HUMLYSYL_PEA_{—}1_T4 (SEQ ID NO:314), HUMLYSYL_PEA_{—}1_T5 (SEQ ID NO:315), HUMLYSYL_PEA_{—}1_T6 (SEQ ID NO:316), HUMLYSYL_PEA_{—}1_T8 (SEQ ID NO:317), HUMLYSYL_PEA_{—}1_T9 (SEQ ID NO:318), HUMLYSYL_PEA_{—}1_T19 (SEQ ID NO:319), HUMLYSYL_PEA_{—}1_T20 (SEQ ID NO:320) and HUMLYSYL_PEA_{—}1_T22 (SEQ ID NO:321). Table 61 below describes the starting and ending position of this segment on each transcript.

TABLE 61
Segment location on transcripts

| | Segment | |
|---|---|---|
| | starting | Segment |
| Transcript name | position | ending position |
| HUMLYSYL_PEA_1_T2 (SEQ ID | 1432 | 1468 |
| NO: 313) | | |
| HUMLYSYL_PEA_1_T4 (SEQ ID | 1573 | 1609 |
| NO: 314) | | |
| HUMLYSYL_PEA_1_T5 (SEQ ID | 1357 | 1393 |
| NO: 315) | | |
| HUMLYSYL_PEA_1_T6 (SEQ ID | 1459 | 1495 |
| NO: 316) | | |
| HUMLYSYL_PEA_1_T8 (SEQ ID | 1688 | 1724 |
| NO: 317) | | |
| HUMLYSYL_PEA_1_T9 (SEQ ID | 1438 | 1474 |
| NO: 318) | | |
| HUMLYSYL_PEA_1_T19 (SEQ ID | 1432 | 1468 |
| NO: 319) | | |
| HUMLYSYL_PEA_1_T20 (SEQ ID | 1432 | 1468 |
| NO: 320) | | |
| HUMLYSYL_PEA_1_T22 (SEQ ID | 1432 | 1468 |
| NO: 321) | | |

[1178] Segment cluster HUMLYSYL_PEA_{—}1_node_{—}41 (SEQ ID NO:351) according to the present invention is supported by 109 libraries. The number of libraries was determined as previously described. This segment can be found in the following transcript(s): HUMLYSYL_PEA_{—}1_T2 (SEQ ID NO:313), HUMLYSYL_PEA_{—}1_T4 (SEQ ID NO:314), HUMLYSYL_PEA_{—}1_T5 (SEQ ID NO:315), HUMLYSYL_PEA_{—}1_T6 (SEQ ID NO:316), HUMLYSYL_PEA_{—}1_T8 (SEQ ID NO:317), HUMLYSYL_PEA_{—}1_T9 (SEQ ID NO:318), HUMLYSYL_PEA_{—}1_T19 (SEQ ID NO:319), HUMLYSYL_PEA_{—}1_T20 (SEQ ID NO:320) and HUMLYSYL_PEA_{—}1_T22 (SEQ ID NO:321). Table 62 below describes the starting and ending position of this segment on each transcript.

TABLE 62
Segment location on transcripts

| | Segment | |
|---|---|---|
| | starting | Segment |
| Transcript name | position | ending position |
| HUMLYSYL_PEA_1_T2 (SEQ ID | 1469 | 1573 |
| NO: 313) | | |
| HUMLYSYL_PEA_1_T4 (SEQ ID | 1610 | 1714 |
| NO: 314) | | |
| HUMLYSYL_PEA_1_T5 (SEQ ID | 1394 | 1498 |
| NO: 315) | | |
| HUMLYSYL_PEA_1_T6 (SEQ ID | 1496 | 1600 |
| NO: 316) | | |
| HUMLYSYL_PEA_1_T8 (SEQ ID | 1725 | 1829 |
| NO: 317) | | |
| HUMLYSYL_PEA_1_T9 (SEQ ID | 1475 | 1579 |
| NO: 318) | | |
| HUMLYSYL_PEA_1_T19 (SEQ ID | 1469 | 1573 |
| NO: 319) | | |
| HUMLYSYL_PEA_1_T20 (SEQ ID | 1469 | 1573 |
| NO: 320) | | |
| HUMLYSYL_PEA_1_T22 (SEQ ID | 1469 | 1573 |
| NO: 321) | | |

[1179] Segment cluster HUMLYSYL_PEA_{—}1 node_{—}42 (SEQ ID NO:352) according to the present invention is supported by 1 libraries. The number of libraries was determined as previously described. This segment can be found in the following transcript(s): HUMLYSYL_PEA_{—}1_T2 (SEQ ID NO:313). Table 63 below describes the starting and ending position of this segment on each transcript.

TABLE 63
Segment location on transcripts

| | Segment | Segment |
|---|---|---|
| Transcript name | starting position | ending position |
| HUMLYSYL_PEA_1_T2 (SEQ ID | 1574 | 1626 |
| NO: 313) | | |

[1180] Segment cluster HUMLYSYL_PEA_{—}1_node_{—}44 (SEQ ID NO:353) according to the present invention can be found in the following transcript(s): HUMLYSYL_PEA_{—}1_T2 (SEQ ID NO:313), HUMLYSYL_PEA_{—}1_T4 (SEQ ID NO:314), HUMLYSYL_PEA_{—}1_T5 (SEQ ID NO:315), HUMLYSYL_PEA_{—}1_T6 (SEQ ID NO:316), HUMLYSYL_PEA_{—}1_T8 (SEQ ID NO:317), HUMLYSYL_PEA_{—}1_T9 (SEQ ID NO:318), HUMLYSYL_PEA_{—}1_T19 (SEQ ID NO:319), HUMLYSYL_PEA_{—}1_T20 (SEQ ID NO:320) and HUMLYSYL_PEA_{—}1_T22 (SEQ ID NO:321). Table 64 below describes the starting and ending position of this segment on each transcript.

TABLE 64
Segment location on transcripts

| | | Segment |
|---|---|---|
| | Segment | ending |
| Transcript name | starting position | position |
| HUMLYSYL_PEA_1_T2 (SEQ ID | 1627 | 1646 |
| NO: 313) | | |
| HUMLYSYL_PEA_1_T4 (SEQ ID | 1715 | 1734 |
| NO: 314) | | |
| HUMLYSYL_PEA_1_T5 (SEQ ID | 1499 | 1518 |
| NO: 315) | | |
| HUMLYSYL_PEA_1_T6 (SEQ ID | 1601 | 1620 |
| NO: 316) | | |
| HUMLYSYL_PEA_1_T8 (SEQ ID | 1830 | 1849 |
| NO: 317) | | |
| HUMLYSYL_PEA_1_T9 (SEQ ID | 1580 | 1599 |
| NO: 318) | | |
| HUMLYSYL_PEA_1_T19 (SEQ ID | 1574 | 1593 |
| NO: 319) | | |
| HUMLYSYL_PEA_1_T20 (SEQ ID | 1574 | 1593 |
| NO: 320) | | |
| HUMLYSYL_PEA_1_T22 (SEQ ID | 1574 | 1593 |
| NO: 321) | | |

[1181] Segment cluster HUMLYSYL_PEA_{—}1_node_{—}45 (SEQ ID NO:354) according to the present invention is supported by 99 libraries. The number of libraries was determined as previously described. This segment can be found in the following transcript(s): HUMLYSYL_PEA_{—}1_T2 (SEQ ID NO:313), HUMLYSYL_PEA_{—}1_T4 (SEQ ID NO:314), HUMLYSYL_PEA_{—}1_T5 (SEQ ID NO:315), HUMLYSYL_PEA_{—}1_T6 (SEQ ID NO:316), HUMLYSYL_PEA_{—}1_T8 (SEQ ID NO:317), HUMLYSYL_PEA_{—}1_T9 (SEQ ID NO:318), HUMLYSYL_PEA_{—}1_T19 (SEQ ID NO:319), HUMLYSYL_PEA_{—}1_T20 (SEQ ID NO:320) and HUMLYSYL_PEA_{—}1_T22 (SEQ ID NO:321). Table 65 below describes the starting and ending position of this segment on each transcript.

TABLE 65
Segment location on transcripts

| | | Segment |
|---|---|---|
| | Segment | ending |
| Transcript name | starting position | position |
| HUMLYSYL_PEA_1_T2 (SEQ ID | 1647 | 1685 |
| NO: 313) | | |
| HUMLYSYL_PEA_1_T4 (SEQ ID | 1735 | 1773 |
| NO: 314) | | |
| HUMLYSYL_PEA_1_T5 (SEQ ID | 1519 | 1557 |
| NO: 315) | | |
| HUMLYSYL_PEA_1_T6 (SEQ ID | 1621 | 1659 |
| NO: 316) | | |
| HUMLYSYL_PEA_1_T8 (SEQ ID | 1850 | 1888 |
| NO: 317) | | |
| HUMLYSYL_PEA_1_T9 (SEQ ID | 1600 | 1638 |
| NO: 318) | | |
| HUMLYSYL_PEA_1_T19 (SEQ ID | 1594 | 1632 |
| NO: 319) | | |
| HUMLYSYL_PEA_1_T20 (SEQ ID | 1594 | 1632 |
| NO: 320) | | |
| HUMLYSYL_PEA_1_T22 (SEQ ID | 1594 | 1632 |
| NO: 321) | | |

[1182] Segment cluster HUMLYSYL_PEA_{—}1_node_{—}46 (SEQ ID NO:355) according to the present invention is supported by 106 libraries. The number of libraries was determined as previously described. This segment can be found in the following transcript(s): HUMLYSYL_PEA_{—}1_T2 (SEQ ID NO:313), HUMLYSYL_PEA_{—}1_T4 (SEQ ID NO:314), HUMLYSYL_PEA_{—}1_T5 (SEQ ID NO:315), HUMLYSYL_PEA_{—}1_T6 (SEQ ID NO:316), HUMLYSYL_PEA_{—}1_T8 (SEQ ID NO:317), HUMLYSYL_PEA_{—}1_T9 (SEQ ID NO:318), HUMLYSYL_PEA_{—}1_T19 (SEQ ID NO:319), HUMLYSYL_PEA_{—}1_T20 (SEQ ID NO:320) and HUMLYSYL_PEA_{—1}_T22 (SEQ ID NO:321). Table 66 below describes the starting and ending position of this segment on each transcript.

TABLE 66
Segment location on transcripts

| | | Segment |
|---|---|---|
| | Segment | ending |
| Transcript name | starting position | position |
| HUMLYSYL_PEA_1_T2 (SEQ ID | 1686 | 1740 |
| NO: 313) | | |
| HUMLYSYL_PEA_1_T4 (SEQ ID | 1774 | 1828 |
| NO: 314) | | |
| HUMLYSYL_PEA_1_T5 (SEQ ID | 1558 | 1612 |
| NO: 315) | | |
| HUMLYSYL_PEA_1_T6 (SEQ ID | 1660 | 1714 |
| NO: 316) | | |
| HUMLYSYL_PEA_1_T8 (SEQ ID | 1889 | 1943 |
| NO: 317) | | |
| HUMLYSYL_PEA_1_T9 (SEQ ID | 1639 | 1693 |
| NO: 318) | | |
| HUMLYSYL_PEA_1_T19 (SEQ ID | 1633 | 1687 |
| NO: 319) | | |
| HUMLYSYL_PEA_1_T20 (SEQ ID | 1633 | 1687 |
| NO: 320) | | |
| HUMLYSYL_PEA_1_T22 (SEQ ID | 1633 | 1687 |
| NO: 321) | | |

[1183] Segment cluster HUMLYSYL_PEA_{—}1_node_{—}48 (SEQ ID NO:356) according to the present invention is supported by 116 libraries. The number of libraries was determined as previously described. This segment can be found in the following transcript(s): HUMLYSYL_PEA_{—}1_T2 (SEQ ID NO:313), HUMLYSYL_PEA_{—}1_T4 (SEQ ID NO:314), HUMLYSYL_PEA_{—}1_T5 (SEQ ID NO:315), HUMLYSYL_PEA_{—}1_T6 (SEQ ID NO:316), HUMLYSYL_PEA_{—}1_T8 (SEQ ID NO:317), HUMLYSYL_PEA_{—}1_T9 (SEQ ID NO:318), HUMLYSYL_PEA_{—}1_T19 (SEQ ID NO:319), HUMLYSYL_PEA_{—}1_T20 (SEQ ID NO:320) and HUMLYSYL_PEA_{—}1_T22 (SEQ ID NO:321). Table 67 below describes the starting and ending position of this segment on each transcript.

TABLE 67
Segment location on transcripts

| | | Segment |
|---|---|---|
| | Segment | ending |
| Transcript name | starting position | position |
| HUMLYSYL_PEA_1_T2 (SEQ ID | 1741 | 1806 |
| NO: 313) | | |
| HUMLYSYL_PEA_1_T4 (SEQ ID | 1829 | 1894 |
| NO: 314) | | |
| HUMLYSYL_PEA_1_T5 (SEQ ID | 1613 | 1678 |
| NO: 315) | | |
| HUMLYSYL_PEA_1_T6 (SEQ ID | 1715 | 1780 |
| NO: 316) | | |
| HUMLYSYL_PEA_1_T8 (SEQ ID | 1944 | 2009 |
| NO: 317) | | |
| HUMLYSYL_PEA_1_T9 (SEQ ID | 1694 | 1759 |
| NO: 318) | | |
| HUMLYSYL_PEA_1_T19 (SEQ ID | 1688 | 1753 |
| NO: 319) | | |
| HUMLYSYL_PEA_1_T20 (SEQ ID | 1688 | 1753 |
| NO: 320) | | |
| HUMLYSYL_PEA_1_T22 (SEQ ID | 1688 | 1753 |
| NO: 321) | | |

[1184] Segment cluster HUMLYSYL_PEA_{—}1_node_{—}49 (SEQ ID NO:357) according to the present invention is supported by 1 libraries. The number of libraries was determined as previously described. This segment can be found in the following transcript(s): HUMLYSYL_PEA_{—}1_T22 (SEQ ID NO:321). Table 68 below describes the starting and ending position of this segment on each transcript.

TABLE 68
Segment location on transcripts

| | | Segment |
|---|---|---|
| | Segment | ending |
| Transcript name | starting position | position |
| HUMLYSYL_PEA_1_T22 (SEQ ID | 1754 | 1862 |
| NO: 321) | | |

[1185] Segment cluster HUMLYSYL_PEA_{—}1_node_{—}52 (SEQ ID NO:358) according to the present invention is supported by 114 libraries. The number of libraries was determined as previously described. This segment can be found in the following transcript(s): HUMLYSYL_PEA_{—}1_T2 (SEQ ID NO:313), HUMLYSYL_PEA_{—}1_T4 (SEQ ID NO:314), HUMLYSYL_PEA_{—}1_T5 (SEQ ID NO:315), HUMLYSYL_PEA_{—}1_T6 (SEQ ID NO:316), HUMLYSYL_PEA_T8 (SEQ ID NO:317), HUMLYSYL_PEA_{—}1_T9 (SEQ ID NO:318), HUMLYSYL_PEA_{—}1_T19 (SEQ ID NO:319) and HUMLYSYL_PEA_{—}1_T20 (SEQ ID NO:320). Table 69 below describes the starting and ending position of this segment on each transcript.

TABLE 69
Segment location on transcripts

| | | Segment |
|---|---|---|
| | Segment | ending |
| Transcript name | starting position | position |
| HUMLYSYL_PEA_1_T2 (SEQ ID | 1807 | 1835 |
| NO: 313) | | |
| HUMLYSYL_PEA_1_T4 (SEQ ID | 1895 | 1923 |
| NO: 314) | | |
| HUMLYSYL_PEA_1_T5 (SEQ ID | 1679 | 1707 |
| NO: 315) | | |
| HUMLYSYL_PEA_1_T6 (SEQ ID | 1781 | 1809 |
| NO: 316) | | |
| HUMLYSYL_PEA_1_T8 (SEQ ID | 2010 | 2038 |
| NO: 317) | | |
| HUMLYSYL_PEA_1_T9 (SEQ ID | 1760 | 1788 |
| NO: 318) | | |
| HUMLYSYL_PEA_1_T19 (SEQ ID | 1754 | 1782 |
| NO: 319) | | |
| HUMLYSYL_PEA_1_T20 (SEQ ID | 1754 | 1782 |
| NO: 320) | | |

[1186] Segment cluster HUMLYSYL_PEA_{—}1_node_{—}53 (SEQ ID NO:359) according to the present invention is supported by 126 libraries. The number of libraries was determined as previously described. This segment can be found in the following transcript(s): HUMLYSYL_PEA_{—}1_T2 (SEQ ID NO:313), HUMLYSYL_PEA_T4 (SEQ ID NO:314), HUMLYSYL_PEA_{—}1_T5 (SEQ ID NO:315), HUMLYSYL PEA_{—}1_T6 (SEQ ID NO:316), HUMLYSYL_PEA_{—}1_T8 (SEQ ID NO:317), HUMLYSYL_PEA_{—}1_T9 (SEQ ID NO:318), HUMLYSYL_PEA_{—}1_T19 (SEQ ID NO:319) and HUMLYSYL_PEA_{—}1_T20 (SEQ ID NO:320). Table 70 below describes the starting and ending position of this segment on each transcript.

TABLE 70
Segment location on transcripts

| | | Segment |
|---|---|---|
| | Segment | ending |
| Transcript name | starting position | position |
| HUMLYSYL_PEA_1_T2 (SEQ ID | 1836 | 1911 |
| NO: 313) | | |
| HUMLYSYL_PEA_1_T4 (SEQ ID | 1924 | 1999 |
| NO: 314) | | |
| HUMLYSYL_PEA_1_T5 (SEQ ID | 1708 | 1783 |
| NO: 315) | | |
| HUMLYSYL_PEA_1_T6 (SEQ ID | 1810 | 1885 |
| NO: 316) | | |
| HUMLYSYL_PEA_1_T8 (SEQ ID | 2039 | 2114 |
| NO: 317) | | |
| HUMLYSYL_PEA_1_T9 (SEQ ID | 1789 | 1864 |
| NO: 318) | | |
| HUMLYSYL_PEA_1_T19 (SEQ ID | 1783 | 1858 |
| NO: 319) | | |
| HUMLYSYL_PEA_1_T20 (SEQ ID | 1783 | 1858 |
| NO: 320) | | |

[1187] Segment cluster HUMLYSYL_PEA_{—}1_node_{—}56 (SEQ ID NO:360) according to the present invention can be found in the following transcript(s): HUMLYSYL_PEA_{—}1_T2 (SEQ ID NO:313), HUMLYSYL_PEA_{—}1_T4 (SEQ ID NO:314), HUMLYSYL_PEA_{—}1_T5 (SEQ ID NO:315), HUMLYSYL_PEA_{—}1_T6 (SEQ ID NO:316), HUMLYSYL_PEA_{—}1_T8 (SEQ ID NO:317) and HUMLYSYL_PEA_{—}1_T9 (SEQ ID NO:318). Table 71 below describes the starting and ending position of this segment on each transcript.

TABLE 71
Segment location on transcripts

| | | Segment |
|---|---|---|
| | Segment | ending |
| Transcript name | starting position | position |
| HUMLYSYL_PEA_1_T2 (SEQ ID | 2041 | 2058 |
| NO: 313) | | |
| HUMLYSYL_PEA_1_T4 (SEQ ID | 2129 | 2146 |
| NO: 314) | | |
| HUMLYSYL_PEA_1_T5 (SEQ ID | 1913 | 1930 |
| NO: 315) | | |
| HUMLYSYL_PEA_1_T6 (SEQ ID | 2015 | 2032 |
| NO: 316) | | |
| HUMLYSYL_PEA_1_T8 (SEQ ID | 2244 | 2261 |
| NO: 317) | | |
| HUMLYSYL_PEA_1_T9 (SEQ ID | 1994 | 2011 |
| NO: 318) | | |

[1188] Segment cluster HUMLYSYL_PEA_{—}1_node_{—}63 (SEQ ID NO:361) according to the present invention can be found in the following transcript(s): HUMLYSYL PEA_{—}1_T2 (SEQ ID NO:313), HUMLYSYL_PEA_{—}1_T4 (SEQ ID NO:314), HUMLYSYL_PEA_{—}1_T5 (SEQ ID NO:315), HUMLYSYL_PEA_{—}1_T6 (SEQ ID NO:316), HUMLYSYL_PEA_{—}1_T8 (SEQ ID NO:317), HUMLYSYL_PEA_{—}1_T9 (SEQ ID NO:318) and HUMLYSYL_PEA_{—}1_T24 (SEQ ID NO:322). Table 72 below describes the starting and ending position of this segment on each transcript.

TABLE 72
Segment location on transcripts

| | | Segment |
|---|---|---|
| | Segment | ending |
| Transcript name | starting position | position |
| HUMLYSYL_PEA_1_T2 (SEQ ID | 2623 | 2644 |
| NO: 313) | | |
| HUMLYSYL_PEA_1_T4 (SEQ ID | 2711 | 2732 |
| NO: 314) | | |
| HUMLYSYL_PEA_1_T5 (SEQ ID | 2495 | 2516 |
| NO: 315) | | |
| HUMLYSYL_PEA_1_T6 (SEQ ID | 2597 | 2618 |
| NO: 316) | | |
| HUMLYSYL_PEA_1_T8 (SEQ ID | 2826 | 2847 |
| NO: 317) | | |
| HUMLYSYL_PEA_1_T9 (SEQ ID | 2576 | 2597 |
| NO: 318) | | |
| HUMLYSYL_PEA_1_T24 (SEQ ID | 544 | 565 |
| NO: 322) | | |

[1189] Segment cluster HUMLYSYL_PEA_{—}1_node_{—}64 (SEQ ID NO:362) according to the present invention is supported by 208 libraries. The number of libraries was determined as previously described. This segment can be found in the following transcript(s): HUMLYSYL_PEA_{—}1_T2 (SEQ ID NO:313), HUMLYSYL_PEA_{—}1_T4 (SEQ ID NO:314), HUMLYSYL_PEA_{—}1_T5 (SEQ ID NO:315), HUMLYSYL_PEA_{—}1_T6 (SEQ ID NO:316), HUMLYSYL_PEA_{—}1_T8 (SEQ ID NO:317), HUMLYSYL_PEA_{—}1_T9 (SEQ ID NO:318) and HUMLYSYL_PEA_{—}1_T24 (SEQ ID NO:322). Table 73 below describes the starting and ending position of this segment on each transcript.

TABLE 73
Segment location on transcripts

| | | Segment |
|---|---|---|
| | Segment | ending |
| Transcript name | starting position | position |
| HUMLYSYL_PEA_1_T2 (SEQ ID | 2645 | 2674 |
| NO: 313) | | |
| HUMLYSYL_PEA_1_T4 (SEQ ID | 2733 | 2762 |
| NO: 314) | | |
| HUMLYSYL_PEA_1_T5 (SEQ ID | 2517 | 2546 |
| NO: 315) | | |
| HUMLYSYL_PEA_1_T6 (SEQ ID | 2619 | 2648 |
| NO: 316) | | |
| HUMLYSYL_PEA_1_T8 (SEQ ID | 2848 | 2877 |
| NO: 317) | | |
| HUMLYSYL_PEA_1_T9 (SEQ ID | 2598 | 2627 |
| NO: 318) | | |
| HUMLYSYL_PEA_1_T24 (SEQ ID | 566 | 595 |
| NO: 322) | | |

[1190] Segment cluster HUMLYSYL_PEA_{—}1_node_{—}66 (SEQ ID NO:363) according to the present invention can be found in the following transcript(s): HUMLYSYL_PEA_{—}1_T2 (SEQ ID NO:313), HUMLYSYL_PEA_{—}1_T4 (SEQ ID NO:314), HUMLYSYL_PEA_{—}1_T5 (SEQ ID NO:315), HUMLYSYL_PEA_{—}1_T6 (SEQ ID NO:316), HUMLYSYL_PEA_{—}1_T8 (SEQ ID NO:317), HUMLYSYL_PEA_{—}1_T9 (SEQ ID NO:318), HUMLYSYL PEA_{—}1_T19 (SEQ ID NO:319) and HUMLYSYL_PEA_{—}1_T24 (SEQ ID NO:322). Table 74 below describes the starting and ending position of this segment on each transcript.

TABLE 74
Segment location on transcripts

| | | Segment |
|---|---|---|
| | Segment | ending |
| Transcript name | starting position | position |
| HUMLYSYL_PEA_1_T2 (SEQ ID | 2815 | 2821 |
| NO: 313) | | |
| HUMLYSYL_PEA_1_T4 (SEQ ID | 2903 | 2909 |
| NO: 314) | | |
| HUMLYSYL_PEA_1_T5 (SEQ ID | 2687 | 2693 |
| NO: 315) | | |
| HUMLYSYL_PEA_1_T6 (SEQ ID | 2789 | 2795 |
| NO: 316) | | |
| HUMLYSYL_PEA_1_T8 (SEQ ID | 3018 | 3024 |
| NO: 317) | | |
| HUMLYSYL_PEA_1_T9 (SEQ ID | 2768 | 2774 |
| NO: 318) | | |
| HUMLYSYL_PEA_1_T19 (SEQ ID | 1859 | 1865 |
| NO: 319) | | |
| HUMLYSYL_PEA_1_T24 (SEQ ID | 736 | 742 |
| NO: 322) | | |

[1191] Segment cluster HUMLYSYL_PEA_{—}1_node_{—}67 (SEQ ID NO:364) according to the present invention is supported by 198 libraries. The number of libraries was determined as previously described. This segment can be found in the following transcript(s): HUMLYSYL_PEA_{—}1_T2 (SEQ ID NO:313), HUMLYSYL_PEA_{—}1_T4 (SEQ ID NO:314), HUMLYSYL_PEA_{—}1_T5 (SEQ ID NO:315), HUMLYSYL_PEA_{—}1_T6 (SEQ ID NO:316), HUMLYSYL_PEA_{—}1_T8 (SEQ ID NO:317), HUMLYSYL_PEA_{—}1_T9 (SEQ ID NO:318), HUMLYSYL_PEA_{—}1_T19 (SEQ ID NO:319) and HUMLYSYL_PEA_{—}1_T24 (SEQ ID NO:322). Table 75 below describes the starting and ending position of this segment on each transcript.

TABLE 75
Segment location on transcripts

| | | Segment |
|---|---|---|
| | Segment | ending |
| Transcript name | starting position | position |
| HUMLYSYL_PEA_1_T2 (SEQ ID | 2822 | 2854 |
| NO: 313) | | |
| HUMLYSYL_PEA_1_T4 (SEQ ID | 2910 | 2942 |
| NO: 314) | | |
| HUMLYSYL_PEA_1_T5 (SEQ ID | 2694 | 2726 |
| NO: 315) | | |
| HUMLYSYL_PEA_1_T6 (SEQ ID | 2796 | 2828 |
| NO: 316) | | |
| HUMLYSYL_PEA_1_T8 (SEQ ID | 3025 | 3057 |
| NO: 317) | | |
| HUMLYSYL_PEA_1_T9 (SEQ ID | 2775 | 2807 |
| NO: 318) | | |
| HUMLYSYL_PEA_1_T19 (SEQ ID | 1866 | 1898 |
| NO: 319) | | |
| HUMLYSYL_PEA_1_T24 (SEQ ID | 743 | 775 |
| NO: 322) | | |

[1192] Segment cluster HUMLYSYL_PEA_{—}1_node_{—}68 (SEQ ID NO:365) according to the present invention is supported by 187 libraries. The number of libraries was determined as previously described. This segment can be found in the following transcript(s): HUMLYSYL_PEA_{—}1_T2 (SEQ ID NO:313), HUMLYSYL_PEA_{—}1_T4 (SEQ ID NO:314), HUMLYSYL_PEA_{—}1_T5 (SEQ ID NO:315), HUMLYSYL_PEA_{—}1_T6 (SEQ ID NO:316), HUMLYSYL_PEA_{—}1_T8 (SEQ ID NO:317), HUMLYSYL_PEA_{—}1_T9 (SEQ ID NO:318), HUMLYSYL_PEA_{—}1_T19 (SEQ ID NO:319) and HUMLYSYL PEA_{—}1_T24 (SEQ ID NO:322). Table 76 below describes the starting and ending position of this segment on each transcript.

TABLE 76
Segment location on transcripts

| | | Segment |
|---|---|---|
| | Segment | ending |
| Transcript name | starting position | position |
| HUMLYSYL_PEA_1_T2 (SEQ ID | 2855 | 2881 |
| NO: 313) | | |
| HUMLYSYL_PEA_1_T4 (SEQ ID | 2943 | 2969 |
| NO: 314) | | |
| HUMLYSYL_PEA_1_T5 (SEQ ID | 2727 | 2753 |
| NO: 315) | | |
| HUMLYSYL_PEA_1_T6 (SEQ ID | 2829 | 2855 |
| NO: 316) | | |
| HUMLYSYL_PEA_1_T8 (SEQ ID | 3058 | 3084 |
| NO: 317) | | |
| HUMLYSYL_PEA_1_T9 (SEQ ID | 2808 | 2834 |
| NO: 318) | | |
| HUMLYSYL_PEA_1_T19 (SEQ ID | 1899 | 1925 |
| NO: 319) | | |
| HUMLYSYL_PEA_1_T24 (SEQ ID | 776 | 802 |
| NO: 322) | | |

[1193] Segment cluster HUMLYSYL_PEA_{—}1_node_{—}70 (SEQ ID NO:366) according to the present invention can be found in the following transcript(s): HUMLYSYL_PEA_{—}1_T2 (SEQ ID NO:313), HUMLYSYL_PEA_{—}1_T4 (SEQ ID NO:314), HUMLYSYL_PEA_{—}1_T5 (SEQ ID NO:315), HUMLYSYL_PEA_{—}1_T6 (SEQ ID NO:316), HUMLYSYL_PEA_{—}1_T8 (SEQ ID NO:317), HUMLYSYL_PEA_{—}1_T9 (SEQ ID NO:318), HUMLYSYL_PEA_{—}1_T19 (SEQ ID NO:319), HUMLYSYL_PEA_{—}1_T20 (SEQ ID NO:320) and HUMLYSYL_PEA_{—}1_T24 (SEQ ID NO:322). Table 77 below describes the starting and ending position of this segment on each transcript.

TABLE 77
Segment location on transcripts

| | | Segment |
|---|---|---|
| | Segment | ending |
| Transcript name | starting position | position |
| HUMLYSYL_PEA_1_T2 (SEQ ID | 2882 | 2894 |
| NO: 313) | | |
| HUMLYSYL_PEA_1_T4 (SEQ ID | 2970 | 2982 |
| NO: 314) | | |
| HUMLYSYL_PEA_1_T5 (SEQ ID | 2754 | 2766 |
| NO: 315) | | |
| HUMLYSYL_PEA_1_T6 (SEQ ID | 2856 | 2868 |
| NO: 316) | | |
| HUMLYSYL_PEA_1_T8 (SEQ ID | 3085 | 3097 |
| NO: 317) | | |
| HUMLYSYL_PEA_1_T9 (SEQ ID | 2835 | 2847 |
| NO: 318) | | |
| HUMLYSYL_PEA_1_T19 (SEQ ID | 1926 | 1938 |
| NO: 319) | | |
| HUMLYSYL_PEA_1_T20 (SEQ ID | 1859 | 1871 |
| NO: 320) | | |
| HUMLYSYL_PEA_1_T24 (SEQ ID | 803 | 815 |
| NO: 322) | | |

[1194] Variant protein alignment to the previously known protein:

[1195] Sequence name: PLO1_HUMAN_V1 (SEQ ID NO:368)

| Sequence documentation: | | | |
|---|---|---|---|
| Alignment of: HUMLYSYL_PEA_1_P2 (SEQ ID NO:369) × | | | |
| PLO1_HUMAN_V1 (SEQ ID NO:368) . . | | | |
| Alignment segment 1/1: | | | |
| Quality: | 4794.00 | Escore: | 0 |
| Matching length: | 490 | Total length: | 490 |
| Matching Percent | 100.00 | Matching Percent | 100.00 |
| Similarity: | | Identity: | |
| Total Percent | 100.00 | Total Percent | 100.00 |
| Similarity: | | Identity: | |
| Gaps: | 0 | | |

| Alignment: | | |
|---|---|---|
| | . . . . . | |
| 1 | MRPLLLLALLGWLLLAEAKGDAKPEDNLLVLTVATKETEGFRRFKRSAQF | 50 |
| | \|\|\|\|\|\|\|\|\|\|\|\|\|\|\|\|\|\|\|\|\|\|\|\|\|\|\|\|\|\|\|\|\|\|\|\|\|\|\|\|\|\|\|\|\|\|\|\|\|\| | |
| 1 | MRPLLLLALLGWLLLAEAKGDAKPEDNLLVLTVATKETEGFRRFKRSAQF | 50 |
| | . . . . . | |
| 51 | FNYKIQALGLGEDWNVEKGTSAGGGQKVRLLKKALEKHADKEDLVILFAD | 100 |
| | \|\|\|\|\|\|\|\|\|\|\|\|\|\|\|\|\|\|\|\|\|\|\|\|\|\|\|\|\|\|\|\|\|\|\|\|\|\|\|\|\|\|\|\|\|\|\|\|\|\| | |
| 51 | FNYKIQALGLGEDWNVEKGTSAGGGQKVRLLKKALEKHADKEDLVILFAD | 100 |
| | . . . . . | |
| 101 | SYDVLFASGPRELLKKFRQARSQVVFSAEELIYPDRRLETKYPVVSDGKR | 150 |
| | \|\|\|\|\|\|\|\|\|\|\|\|\|\|\|\|\|\|\|\|\|\|\|\|\|\|\|\|\|\|\|\|\|\|\|\|\|\|\|\|\|\|\|\|\|\|\|\|\|\| | |
| 101 | SYDVLFASGPRELLKKFRQARSQVVFSAEELIYPDRRLETKYPVVSDGKR | 150 |
| | . . . . . | |
| 151 | FLGSGGFIGYAPNLSKLVAEWEGQDSDSDQLFYTKIFLDPEKREQINITL | 200 |
| | \|\|\|\|\|\|\|\|\|\|\|\|\|\|\|\|\|\|\|\|\|\|\|\|\|\|\|\|\|\|\|\|\|\|\|\|\|\|\|\|\|\|\|\|\|\|\|\|\|\| | |
| 151 | FLGSGGFIGYAPNLSKLVAEWEGQDSDSDQLFYTKIFLDPEKREQINITL | 200 |
| | . . . . . | |
| 201 | DHRCRIFQNLDGALDEVVLKFEMGHVRARNLAYDTLPVLIHGNGPTKLQL | 250 |
| | \|\|\|\|\|\|\|\|\|\|\|\|\|\|\|\|\|\|\|\|\|\|\|\|\|\|\|\|\|\|\|\|\|\|\|\|\|\|\|\|\|\|\|\|\|\|\|\|\|\| | |
| 201 | DHRCRIFQNLDGALDEVVLKFEMGHVRARNLAYDTLPVLIHGNGPTKLQL | 250 |
| | . . . . . | |
| 251 | NYLGNYIPRFWTFETGCTVCDEGLRSLKGIGDEALPTVLVGVFIEQPTPF | 300 |
| | \|\|\|\|\|\|\|\|\|\|\|\|\|\|\|\|\|\|\|\|\|\|\|\|\|\|\|\|\|\|\|\|\|\|\|\|\|\|\|\|\|\|\|\|\|\|\|\|\|\| | |
| 251 | NYLGNYIPRFWTFETGCTVCDEGLRSLKGIGDEALPTVLVGVFIEQPTPF | 300 |
| | . . . . . | |
| 301 | VSLFFQRLLRLHYPQKHMRLFIHNHEQHHKAQVEEFLAQHGSEYQSVKLV | 350 |
| | \|\|\|\|\|\|\|\|\|\|\|\|\|\|\|\|\|\|\|\|\|\|\|\|\|\|\|\|\|\|\|\|\|\|\|\|\|\|\|\|\|\|\|\|\|\|\|\|\|\| | |
| 301 | VSLFFQRLLRLHYPQKHMRLFIHNHEQHHKAQVEEFLAQHGSEYQSVKLV | 350 |
| | . . . . . | |
| 351 | GPEVRMANADARNMGADLCRQDRSCTYYFSVDADVALTEPNSLRLLIQQN | 400 |
| | \|\|\|\|\|\|\|\|\|\|\|\|\|\|\|\|\|\|\|\|\|\|\|\|\|\|\|\|\|\|\|\|\|\|\|\|\|\|\|\|\|\|\|\|\|\|\|\|\|\| | |
| 351 | GPEVRMANADARNMGADLCRQDRSCTYYFSVDADVALTEPNSLRLLIQQN | 400 |
| | . . . . . | |
| 401 | KNVIAPLMTRHGRLWSNFWGALSADGYYARSEDYVDIVQGRRVGVWNVPY | 450 |
| | \|\|\|\|\|\|\|\|\|\|\|\|\|\|\|\|\|\|\|\|\|\|\|\|\|\|\|\|\|\|\|\|\|\|\|\|\|\|\|\|\|\|\|\|\|\|\|\|\|\| | |
| 401 | KNVIAPLMTRHGRLWSNFWGALSADGYYARSEDYVDIVQGRRVGVWNVPY | 450 |
| | . . . . | |
| 451 | ISNIYLIKGSALRGELQSSDLFHHSKLDPDMAFCANIRQQ | 490 |
| | \|\|\|\|\|\|\|\|\|\|\|\|\|\|\|\|\|\|\|\|\|\|\|\|\|\|\|\|\|\|\|\|\|\|\|\|\|\|\|\| | |
| 451 | ISNIYLIKGSALRGELQSSDLFHHSKLDPDMAFCANIRQQ | 490 |

| Sequence name: PLO1_HUMAN_V1 (SEQ ID NO:368) | | | |
|---|---|---|---|
| Sequence documentation: | | | |
| Alignment of: HUMLYSYL_PEA_1_P4 (SEQ ID NO:370) × | | | |
| PLO1_HUMAN_V1 (SEQ ID NO:368) . . | | | |
| Alignment segment 1/1: | | | |
| Quality: | 7109.00 | Escore: | 0 |
| Matching length: | 727 | Total length: | 774 |
| Matching Percent | 100.00 | Matching Percent | 100.00 |
| Similarity: | | Identity: | |
| Total Percent | 93.93 | Total Percent | 93.93 |
| Similarity: | | Identity: | |
| Gaps: | 1 | | |

| Alignment: | | |
|---|---|---|
| | . . . . . | |
| 1 | MRPLLLLALLGWLLLAEAKGDAKPEAPCCQEGLRAGGSGSLHLGRDFTVL | 50 |
| | \|\|\|\|\|\|\|\|\|\|\|\|\|\|\|\|\|\|\|\|\|\|\|\|\|\|\|\|\|\|\|\|\|\|\|\|\|\|\|\|\|\|\|\|\|\|\|\|\|\| | |
| 1 | MRPLLLLALLGWLLLAEAKGDAKPE......................... | 25 |
| | . . . . . | |
| 51 | AGARGSPSPSVSSIPRFWIPGSDNLLVLTVATKETEGFRRFKRSAQFFNY | 100 |
| | \|\|\|\|\|\|\|\|\|\|\|\|\|\|\|\|\|\|\|\|\|\|\|\|\|\|\|\|\|\|\|\|\|\|\|\|\|\|\|\|\|\|\|\|\|\|\|\|\|\| | |
| 26 | ......................DNLLVLTVATKETEGFRRFKRSAQFFNY | 53 |
| | . . . . . | |
| 101 | KIQALGLGEDWNVEKGTSAGGGQKVRLLKKALEKHADKEDLVILFADSYD | 150 |
| | \|\|\|\|\|\|\|\|\|\|\|\|\|\|\|\|\|\|\|\|\|\|\|\|\|\|\|\|\|\|\|\|\|\|\|\|\|\|\|\|\|\|\|\|\|\|\|\|\|\| | |
| 54 | KIQALGLGEDWNVEKGTSAGGGQKVRLLKKALEKHADKEDLVILFADSYD | 103 |
| | . . . . . | |
| 151 | VLFASGPRELLKKFRQARSQVVFSAEELIYPDRRLETKYPVVSDGKRFLG | 200 |
| | \|\|\|\|\|\|\|\|\|\|\|\|\|\|\|\|\|\|\|\|\|\|\|\|\|\|\|\|\|\|\|\|\|\|\|\|\|\|\|\|\|\|\|\|\|\|\|\|\|\| | |
| 104 | VLFASGFRELLKKFRQARSQVVFSAEELIYPDRRLETKYPVVSDGKRFLG | 153 |
| | . . . . . | |
| 201 | SGGFIGYAPNLSKLVAEWEGQDSDSDQLFYTKIFLDPEKREQINITLDHR | 250 |
| | \|\|\|\|\|\|\|\|\|\|\|\|\|\|\|\|\|\|\|\|\|\|\|\|\|\|\|\|\|\|\|\|\|\|\|\|\|\|\|\|\|\|\|\|\|\|\|\|\|\| | |
| 154 | SGGFIGYAPNLSKLVAEWEGQDSDSDQLFYTKIFLDPEKREQINITLDHR | 203 |
| | . . . . . | |
| 251 | CRIFQNLDGALDEVVLKFEMGHVRARNLAYDTLPVLIHGNGPTKLQLNYL | 300 |
| | \|\|\|\|\|\|\|\|\|\|\|\|\|\|\|\|\|\|\|\|\|\|\|\|\|\|\|\|\|\|\|\|\|\|\|\|\|\|\|\|\|\|\|\|\|\|\|\|\|\| | |
| 204 | CRIFQNLDGALDEVVLKFEMGHVRARNLAYDTLPVLIHGNGPTKLQLNYL | 253 |
| | . . . . . | |
| 301 | GNYIPRFWTFETGCTVCDEGLRSLKGIGDEALPTVLVGVFIEQPTPFVSL | 350 |
| | \|\|\|\|\|\|\|\|\|\|\|\|\|\|\|\|\|\|\|\|\|\|\|\|\|\|\|\|\|\|\|\|\|\|\|\|\|\|\|\|\|\|\|\|\|\|\|\|\|\| | |
| 254 | GNYIPRFWTFETGCTVCDEGLRSLKGIGDEALPTVLVGVFIEQPTPFVSL | 303 |
| | . . . . . | |
| 351 | FFQRLLRLHYPQKHMRLFIHNHEQHHKAQVEEFLAQHGSEYQSVKLVGPE | 400 |
| | \|\|\|\|\|\|\|\|\|\|\|\|\|\|\|\|\|\|\|\|\|\|\|\|\|\|\|\|\|\|\|\|\|\|\|\|\|\|\|\|\|\|\|\|\|\|\|\|\|\| | |
| 304 | FFQRLLRLHYPQKHMRLFIHNHEQHHKAQVEEFLAQHGSEYQSVKLVGPE | 353 |
| | . . . . . | |
| 401 | VRMANADARNMGADLCRQDRSCTYYFSVDADVALTEPNSLRLLIQQNKNV | 450 |
| | \|\|\|\|\|\|\|\|\|\|\|\|\|\|\|\|\|\|\|\|\|\|\|\|\|\|\|\|\|\|\|\|\|\|\|\|\|\|\|\|\|\|\|\|\|\|\|\|\|\| | |
| 354 | VRMANADARNMGADLCRQDRSCTYYFSVDADVALTEPNSLRLLIQQNKNV | 403 |
| | . . . . . | |
| 451 | IAPLMTRHGRLWSNFWGALSADGYYARSEDYVDIVQGRRVGVWNVPYISN | 500 |
| | \|\|\|\|\|\|\|\|\|\|\|\|\|\|\|\|\|\|\|\|\|\|\|\|\|\|\|\|\|\|\|\|\|\|\|\|\|\|\|\|\|\|\|\|\|\|\|\|\|\| | |
| 404 | IAPLMTRHGRLWSNFWGALSADGYYARSEDYVDIVQGRRVGVWNVPYISN | 453 |
| | . . . . . | |
| 501 | IYLIKGSALRGELQSSDLFHHSKLDPDMAFCANIRQQDVFMFLTNRHTLG | 550 |
| | \|\|\|\|\|\|\|\|\|\|\|\|\|\|\|\|\|\|\|\|\|\|\|\|\|\|\|\|\|\|\|\|\|\|\|\|\|\|\|\|\|\|\|\|\|\|\|\|\|\| | |
| 454 | IYLIKGSALRGELQSSDLFHHSKLDPDMAFCANIRQQDVFMFLTNRHTLG | 503 |
| | . . . . . | |
| 551 | HLLSLDSYRTTHLHNDLWEVFSNPEDWKEKYIHQNYTKALAGKLVETPCP | 600 |
| | \|\|\|\|\|\|\|\|\|\|\|\|\|\|\|\|\|\|\|\|\|\|\|\|\|\|\|\|\|\|\|\|\|\|\|\|\|\|\|\|\|\|\|\|\|\|\|\|\|\| | |
| 504 | HLLSLDSYRTTHLHNDLWEVFSNPEDWKEKYIHQNYTKALAGKLVETPCP | 553 |
| | . . . . . | |
| 601 | DVYWFPIFTEVACDELVEEMEHFGQWSLGNNKDNRIQGGYENVPTIDIHM | 650 |
| | \|\|\|\|\|\|\|\|\|\|\|\|\|\|\|\|\|\|\|\|\|\|\|\|\|\|\|\|\|\|\|\|\|\|\|\|\|\|\|\|\|\|\|\|\|\|\|\|\|\| | |
| 554 | DVYWFPIFTEVACDELVEEMEHFGQWSLGNNKDNRIQGGYENVPTIDIHM | 603 |
| | . . . . . | |
| 651 | NQIGFEREWHKFLLEYIAPMTEKLYPGYYTRAQFDLAFVVRYKPDEQPSL | 700 |
| \|\|\|\|\|\|\|\|\|\|\|\|\|\|\|\|\|\|\|\|\|\|\|\|\|\|\|\|\|\|\|\|\|\|\|\|\|\|\|\|\|\|\|\|\|\|\|\|\|\| | | |
| 604 | NQIGFEREWHKFLLEYIAPMTEKLYPGYYTRAQFDLAFVVRYKPDEQPSL | 653 |
| | . . . . . | |
| 701 | MPHHDASTFTINIALNRVGVDYEGGGCRFLRYNCSIRAPRKGWTLMHPGR | 750 |
| | \|\|\|\|\|\|\|\|\|\|\|\|\|\|\|\|\|\|\|\|\|\|\|\|\|\|\|\|\|\|\|\|\|\|\|\|\|\|\|\|\|\|\|\|\|\|\|\|\|\| | |
| 654 | MPHHDASTFTINIALNRVGVDYEGGGCRFLRYNCSIRAPRKGWTLMHPGR | 703 |
| | . . | |
| 751 | LTHYHEGLPTTRGTRYIAVSFVDP | 774 |
| | \|\|\|\|\|\|\|\|\|\|\|\|\|\|\|\|\|\|\|\|\|\|\|\| | |
| 704 | LTHYHEGLPTTRGTRYIAVSFVDP | 727 |

| Sequence name: PLO1_HUMAN_V1 (SEQ ID NO:368) | | | |
|---|---|---|---|
| Sequence documentation: | | | |
| Alignment of: HUMLYSYL_PEA_1_P5 (SEQ ID NO:371) × | | | |
| PLO1_HUMAN_V1 (SEQ ID NO:368) . . | | | |
| Alignment segment 1/1: | | | |
| Quality: | 6869.00 | Escore: | 0 |
| Matching length: | 702 | Total length: | 727 |
| Matching Percent Similarity: | 100.00 | Matching Percent Identity: | 100.00 |
| Total Percent Similarity: | 96.56 | Total Percent Identity: | 96.56 |
| Gaps: | 1 | | |

| Alignment: | | |
|---|---|---|
| | . . . . . | |
| 1 | MRPLLLLALLGWLLLAEAKGDAKPEDNLLVLTVATKETEGFRRFKRSAQF | 50 |
| | \|\|\|\|\|\|\|\|\|\|\|\|\|\|\|\|\|\|\|\|\|\|\|\|\|\|\|\|\|\|\|\|\|\|\|\|\|\|\|\|\|\|\|\|\|\|\|\|\|\| | |
| 1 | MRPLLLLALLGWLLLAEAKGDAKPEDNLLVLTVATKETEGFRRFKRSAQF | 50 |
| | . . . . . | |
| 51 | FNYKIQALGLGEDWNVEKGTSAGGGQKVRLLKKALEKHADKEDLVILFAD | 100 |
| | \|\|\|\|\|\|\|\|\|\|\|\|\|\|\|\|\|\|\|\|\|\|\|\|\|\|\|\|\|\|\|\|\|\|\|\|\|\|\|\|\|\|\|\|\|\|\|\|\|\| | |
| 51 | FNYKIQALGLGEDWNVEKGTSAGGGQKVRLLKKALEKHADKEDLVILFAD | 100 |
| | . . . . . | |
| 101 | SYDVLFASGPRELLKKFRQARSQVVFSAEELIYPDRRLETKYPVVSDGKR | 150 |
| | \|\|\|\|\|\|\|\|\|\|\|\|\|\|\|\|\|\|\|\|\|\|\|\|\|\|\|\|\|\|\|\|\|\|\|\|\|\|\|\|\|\|\|\|\|\|\|\|\|\| | |
| 101 | SYDVLFASGPRELLKKFRQARSQVVFSAEELIYPDRRLETKYPVVSDGKR | 150 |
| | . . . . . | |
| 151 | FLGSGGFIGYAPNLSKLVAEWEGQDSDSDQLFYTKIFLDPEKREQINITL | 200 |
| | \|\|\|\|\|\|\|\|\|\|\|\|\|\|\|\|\|\|\|\|\|\|\|\|\|\|\|\|\|\|\|\|\|\|\|\|\|\|\|\|\|\|\|\|\|\|\|\|\|\| | |
| 151 | FLGSGGFIGYAPNLSKLVAEWEGQDSDSDQLFYTKIFLDPEKREQINITL | 200 |
| | . . . . . | |
| 201 | DHRCRIFQNLDGALDEVVLKFEMGHVRARNLAYDTLPVLIHGNGPTKLQL | 250 |
| | \|\|\|\|\|\|\|\|\|\|\|\|\|\|\|\|\|\|\|\|\|\|\|\|\|\|\|\|\|\|\|\|\|\|\|\|\|\|\|\|\|\|\|\|\|\|\|\|\|\| | |
| 201 | DHRCRIFQNLDGALDEVVLKFEMGHVRARNLAYDTLPVLIHGNGFTKLQL | 250 |
| | . . . . . | |
| 251 | NYLGNYIPRFWTFETGCTVCDEGLRSLKGIG................... | 281 |
| | \|\|\|\|\|\|\|\|\|\|\|\|\|\|\|\|\|\|\|\|\|\|\|\|\|\|\|\|\|\|\|\|\|\|\|\|\|\|\|\|\|\|\|\|\|\|\|\|\|\| | |
| 251 | NYLGNYIPRFWTFETGCTVCDEGLRSLKGIGDEALPTVLVGVFIEQPTPF | 300 |
| | . . . . . | |
| 282 | ......RLLRLHYPQKHMRLFIHNHEQHHKAQVEEFLAQHGSEYQSVKLV | 325 |
| | \|\|\|\|\|\|\|\|\|\|\|\|\|\|\|\|\|\|\|\|\|\|\|\|\|\|\|\|\|\|\|\|\|\|\|\|\|\|\|\|\|\|\|\|\|\|\|\|\|\| | |
| 301 | VSLFFQRLLRLHYPQKHMRLFIHNHEQHHKAQVEEFLAQHGSEYQSVKLV | 350 |
| | . . . . . | |
| 326 | GPEVRMANADARNMGADLCRQDRSCTYYFSVDADVALTEPNSLRLLIQQN | 375 |
| | \|\|\|\|\|\|\|\|\|\|\|\|\|\|\|\|\|\|\|\|\|\|\|\|\|\|\|\|\|\|\|\|\|\|\|\|\|\|\|\|\|\|\|\|\|\|\|\|\|\| | |
| 351 | GPEVRMANADARNMGADLCRQDRSCTYYFSVDADVALTEPNSLRLLIQQN | 400 |
| | . . . . . | |
| 376 | KNVIAPLMTRHGRLWSNFWGALSADGYYARSEDYVDIVQGRRVGVWNVPY | 425 |
| | \|\|\|\|\|\|\|\|\|\|\|\|\|\|\|\|\|\|\|\|\|\|\|\|\|\|\|\|\|\|\|\|\|\|\|\|\|\|\|\|\|\|\|\|\|\|\|\|\|\| | |
| 401 | KNVIAPLMTRHGRLWSNFWGALSADGYYARSEDYVDIVQGRRVGVWNVPY | 450 |
| | . . . . . | |
| 426 | ISNIYLIKGSALRGELQSSDLFHHSKLDPDMAFCANIRQQDVFMFLTNRH | 475 |
| | \|\|\|\|\|\|\|\|\|\|\|\|\|\|\|\|\|\|\|\|\|\|\|\|\|\|\|\|\|\|\|\|\|\|\|\|\|\|\|\|\|\|\|\|\|\|\|\|\|\| | |
| 451 | ISNIYLIKGSALRGELQSSDLFHHSKLDPDMAFCANIRQQDVFMFLTNRH | 500 |
| | . . . . . | |
| 476 | TLGHLLSLDSYRTTHLHNDLWEVFSNPEDWKEKYIHQNYTKALAGKLVET | 525 |
| | \|\|\|\|\|\|\|\|\|\|\|\|\|\|\|\|\|\|\|\|\|\|\|\|\|\|\|\|\|\|\|\|\|\|\|\|\|\|\|\|\|\|\|\|\|\|\|\|\|\| | |
| 501 | TLGHLLSLDSYRTTHLHNDLWEVFSNPEDWKEKYIHQNYTKALAGKLVET | 550 |
| | . . . . . | |
| 526 | PCPDVYWFPIFTEVACDELVEEMEHFGQWSLGNNKDNRIQGGYENVPTID | 575 |
| | \|\|\|\|\|\|\|\|\|\|\|\|\|\|\|\|\|\|\|\|\|\|\|\|\|\|\|\|\|\|\|\|\|\|\|\|\|\|\|\|\|\|\|\|\|\|\|\|\|\| | |
| 551 | PCPDVYWFPIFTEVACDELVEEMEHFGQWSLGNNKDNRIQGGYENVPTID | 600 |
| | . . . . . | |
| 576 | IHMNQIGFEREWHKFLLEYIAPMTEKLYPGYYTRAQFDLAFVVRYKPDEQ | 625 |
| | \|\|\|\|\|\|\|\|\|\|\|\|\|\|\|\|\|\|\|\|\|\|\|\|\|\|\|\|\|\|\|\|\|\|\|\|\|\|\|\|\|\|\|\|\|\|\|\|\|\| | |
| 601 | IHMNQIGFEREWHKFLLEYIAPMTEKLYPGYYTRAQFDLAFVVRYKPDEQ | 650 |
| | . . . . . | |
| 626 | PSLMPHHDASTFTINIALNRVGVDYEGGGCRFLRYNCSIRAPRKGWTLMH | 675 |
| | \|\|\|\|\|\|\|\|\|\|\|\|\|\|\|\|\|\|\|\|\|\|\|\|\|\|\|\|\|\|\|\|\|\|\|\|\|\|\|\|\|\|\|\|\|\|\|\|\|\| | |
| 651 | PSLMPHHDASTFTINIALNRVGVDYEGGGCRFLRYNCSIRAPRKGWTLMH | 700 |
| | . . | |
| 676 | PGRLTHYHEGLPTTRGTRYIAVSFVDP | 702 |
| | \|\|\|\|\|\|\|\|\|\|\|\|\|\|\|\|\|\|\|\|\|\|\|\|\|\|\| | |
| 701 | PGRLTHYHEGLPTTRGTRYIAVSFVDP | 727 |

| Sequence name: PLO1_HUMAN_V1 (SEQ ID NO:368) | | | |
|---|---|---|---|
| Sequence documentation: | | | |
| Alignment of: HUMLYSYL_PEA_1_P6 (SEQ ID NO:372) × | | | |
| PLO1_HUMAN_V1 (SEQ ID NO:368) . . | | | |
| Alignment segment 1/1: | | | |
| Quality: | 7109.00 | Escore: | 0 |
| Matching length: | 727 | Total length: | 736 |
| Matching Percent | 100.00 | Matching Percent | 100.00 |
| Similarity: | | Identity: | |
| Total Percent | 98.78 | Total Percent | 98.78 |
| Similarity: | | Identity: | |
| Gaps: | 1 | | |

| Alignment: | | |
|---|---|---|
| | . . . . . | |
| 1 | MRPLLLLALLGWLLLAEAKGDAKPEDNLLVLTVATKETEGFRRFKRSAQF | 50 |
| | \|\|\|\|\|\|\|\|\|\|\|\|\|\|\|\|\|\|\|\|\|\|\|\|\|\|\|\|\|\|\|\|\|\|\|\|\|\|\|\|\|\|\|\|\|\|\|\|\|\| | |
| 1 | MRPLLLLALLGWLLLAEAKGDAKPEDNLLVLTVATKETEGFRRFKRSAQF | 50 |
| | . . . . . | |
| 51 | FNYKIQPVLRGVSLQALGLGEDWNVEKGTSAGGGQKVRLLKKALEKHADK | 100 |
| | \|\|\|\|\| \|\|\|\|\|\|\|\|\|\|\|\|\|\|\|\|\|\|\|\|\|\|\|\|\|\|\|\|\|\|\|\|\|\|\|\| | |
| 51 | FNYKI.........QALGLGEDWNVEKGTSAGGGQKVRLLKKALEKHADK | 91 |
| | . . . . . | |
| 101 | EDLVILFADSYDVLFASGPRELLKKFRQARSQVVFSAEELIYPDRRLETK | 150 |
| | \|\|\|\|\|\|\|\|\|\|\|\|\|\|\|\|\|\|\|\|\|\|\|\|\|\|\|\|\|\|\|\|\|\|\|\|\|\|\|\|\|\|\|\|\|\|\|\|\|\| | |
| 92 | EDLVILFADSYDVLFASGPRELLKKFRQARSQVVFSAEELIYPDRRLETK | 141 |
| | . . . . . | |
| 151 | YPVVSDGKRFLGSGGFIGYAPNLSKLVAEWEGQDSDSDQLFYTKIFLDPE | 200 |
| | \|\|\|\|\|\|\|\|\|\|\|\|\|\|\|\|\|\|\|\|\|\|\|\|\|\|\|\|\|\|\|\|\|\|\|\|\|\|\|\|\|\|\|\|\|\|\|\|\|\| | |
| 142 | YPVVSDGKRFLGSGGFIGYAPNLSKLVAEWEGQDSDSDQLFYTKIFLDPE | 191 |
| | . . . . . | |
| 201 | KREQINITLDHRCRIFQNLDGALDEVVLKFEMGHVRARNLAYDTLFVLIH | 250 |
| | \|\|\|\|\|\|\|\|\|\|\|\|\|\|\|\|\|\|\|\|\|\|\|\|\|\|\|\|\|\|\|\|\|\|\|\|\|\|\|\|\|\|\|\|\|\|\|\|\|\| | |
| 192 | KREQINITLDHRCRIFQNLDGALDEVVLKFEMGHVRARNLAYDTLPVLIH | 241 |
| | . . . . . | |
| 251 | GNGPTKLQLNYLGNYIPRFWTFETGCTVCDEGLRSLKGIGDEALPTVLVG | 300 |
| | \|\|\|\|\|\|\|\|\|\|\|\|\|\|\|\|\|\|\|\|\|\|\|\|\|\|\|\|\|\|\|\|\|\|\|\|\|\|\|\|\|\|\|\|\|\|\|\|\|\| | |
| 242 | GNGPTKLQLNYLGNYIPRFWTFETGCTVCDEGLRSLKGIGDEALPTVLVG | 291 |
| | . . . . . | |
| 301 | VFIEQPTPFVSLFFQRLLRLHYPQKHMRLFIHNHEQHHKAQVEEFLAQHG | 350 |
| | \|\|\|\|\|\|\|\|\|\|\|\|\|\|\|\|\|\|\|\|\|\|\|\|\|\|\|\|\|\|\|\|\|\|\|\|\|\|\|\|\|\|\|\|\|\|\|\|\|\| | |
| 292 | VFIEQPTPFVSLFFQRLLRLHYPQKHMRLFIHNHEQHHKAQVEEFLAQHG | 341 |
| | . . . . . | |
| 351 | SEYQSVKLVGPEVRMANADARNMGADLCRQDRSCTYYFSVDADVALTEPN | 400 |
| | \|\|\|\|\|\|\|\|\|\|\|\|\|\|\|\|\|\|\|\|\|\|\|\|\|\|\|\|\|\|\|\|\|\|\|\|\|\|\|\|\|\|\|\|\|\|\|\|\|\| | |
| 342 | SEYQSVKLVGPEVRMANADARNMGADLCRQDRSCTYYFSVDADVALTEPN | 391 |
| | . . . . . | |
| 401 | SLRLLIQQNKNVIAPLMTRHGRLWSNFWGALSADGYYARSEDYVDIVQGR | 450 |
| | \|\|\|\|\|\|\|\|\|\|\|\|\|\|\|\|\|\|\|\|\|\|\|\|\|\|\|\|\|\|\|\|\|\|\|\|\|\|\|\|\|\|\|\|\|\|\|\|\|\| | |
| 392 | SLRLLIQQNKNVIAPLMTRHGRLWSNFWGALSADGYYARSEDYVDIVQGR | 441 |
| | . . . . . | |
| 451 | RVGVWNVPYISNIYLIKGSALRGELQSSDLFHHSKLDPDMAFCANIRQQD | 500 |
| | \|\|\|\|\|\|\|\|\|\|\|\|\|\|\|\|\|\|\|\|\|\|\|\|\|\|\|\|\|\|\|\|\|\|\|\|\|\|\|\|\|\|\|\|\|\|\|\|\|\| | |
| 442 | RVGVWNVPYISNIYLIKGSALRGELQSSDLFHHSKLDPDMAFCANIRQQD | 491 |
| | . . . . . | |
| 501 | VFMFLTNRHTLGHLLSLDSYRTTHLHNDLWEVFSNPEDWKEKYIHQNYTK | 550 |
| | \|\|\|\|\|\|\|\|\|\|\|\|\|\|\|\|\|\|\|\|\|\|\|\|\|\|\|\|\|\|\|\|\|\|\|\|\|\|\|\|\|\|\|\|\|\|\|\|\|\| | |
| 492 | VFMFLTNRHTLGHLLSLDSYRTTHLHNDLWEVFSNFEDWKEKYIHQNYTK | 541 |
| | . . . . . | |
| 551 | ALAGKLVETPCPDVYWFPIFTEVACDELVEEMEHFGQWSLGNNKDNRIQG | 600 |
| | \|\|\|\|\|\|\|\|\|\|\|\|\|\|\|\|\|\|\|\|\|\|\|\|\|\|\|\|\|\|\|\|\|\|\|\|\|\|\|\|\|\|\|\|\|\|\|\|\|\| | |
| 542 | ALAGKLVETPCPDVYWFPIFTEVACDELVEEMEHFGQWSLGNNKDNRIQG | 591 |
| | . . . . . | |
| 601 | GYENVPTIDIHMNQIGFEREWHKFLLEYIAPMTEKLYPGYYTRAQFDLAF | 650 |
| | \|\|\|\|\|\|\|\|\|\|\|\|\|\|\|\|\|\|\|\|\|\|\|\|\|\|\|\|\|\|\|\|\|\|\|\|\|\|\|\|\|\|\|\|\|\|\|\|\|\| | |
| 592 | GYENVPTIDIHMNQIGFEREWHKFLLEYIAPMTEKLYPGYYTRAQFDLAF | 641 |
| | . . . . . | |
| 651 | VVRYKPDEQPSLMPHHDASTFTINIALNRVGVDYEGGGCRFLRYNCSIRA | 700 |
| | \|\|\|\|\|\|\|\|\|\|\|\|\|\|\|\|\|\|\|\|\|\|\|\|\|\|\|\|\|\|\|\|\|\|\|\|\|\|\|\|\|\|\|\|\|\|\|\|\|\| | |
| 642 | VVRYKPDEQPSLMPHHDASTFTINIALNRVGVDYEGGGCRFLRYNCSIRA | 691 |
| | . . . | |
| 701 | PRKGWTLMHPGRLTHYHEGLPTTRGTRYIAVSFVDP | 736 |
| | \|\|\|\|\|\|\|\|\|\|\|\|\|\|\|\|\|\|\|\|\|\|\|\|\|\|\|\|\|\|\|\|\|\|\|\| | |
| 692 | PRKGWTLMHPGRLTHYHEGLPTTRGTRYIAVSFVDP | 727 |

| Sequence name: PLO1_HUMAN_V1 (SEQ ID NO:368) | | | |
|---|---|---|---|
| Sequence documentation: | | | |
| Alignment of: HUMLYSYL_PEA_1_P7 (SEQ ID NO:373) × | | | |
| PLO1_HUMAN_V1 (SEQ ID NO:368) . . | | | |
| Alignment segment 1/1: | | | |
| Quality: | 6697.00 | Escore: | 0 |
| Matching length: | 698 | Total length: | 758 |
| Matching Percent | 99.71 | Matching Percent | 99.71 |
| Similarity: | | Identity: | |
| Total Percent | 91.82 | Total Percent | 91.82 |
| Similarity: | | Identity: | |
| Gaps: | 2 | | |

| Alignment: | | |
|---|---|---|
| | . . . . . | |
| 1 | MRPLLLLALLGWLLLAEAKGDAKPEDNLLVLTVATKETEGFRRFKRSAQF | 50 |
| | \|\|\|\|\|\|\|\|\|\|\|\|\|\|\|\|\|\|\|\|\|\|\|\|\|\|\|\|\|\|\|\|\|\|\|\|\|\|\|\|\|\|\|\|\|\|\|\|\|\| | |
| 1 | MRPLLLLALLGWLLLAEAKGDAKPEDNLLVLTVATKETEGFRRFKRSAQF | 50 |
| | . . . . . | |
| 51 | FNYKIQALGLGEDWNVEKGTSAGGGQKVRLLKKALEKHADKEDLVILFAD | 100 |
| | \|\|\|\|\|\|\|\|\|\|\|\|\|\|\|\|\|\|\|\|\|\|\|\|\|\|\|\|\|\|\|\|\|\|\|\|\|\|\|\|\|\|\|\|\|\|\|\|\|\| | |
| 51 | FNYKIQALGLGEDWNVEKGTSAGGGQKVRLLKKALEKHADKEDLVILFAD | 100 |
| | . . . . . | |
| 101 | SYDVLFASGPRELLKKFRQARSQVVFSAEELIYPDRRLETKYPVVSDGKR | 150 |
| | \|\|\|\|\|\|\|\|\|\|\|\|\|\|\|\|\|\|\|\|\|\|\|\|\|\|\|\|\|\|\|\|\|\|\|\|\|\|\|\|\|\|\|\|\|\|\|\|\|\| | |
| 101 | SYDVLFASGPRELLKKFRQARSQVVFSAEELIYPDRRLETKYPVVSDGKR | 150 |
| | . . . . . | |
| 151 | FLGSGGFIGYAPNLSKLVAEWEGQDSDSDQLFYTKIFLDPEKREQINITL | 200 |
| | \|\|\|\|\|\|\|\|\|\|\|\|\|\|\|\|\|\|\|\|\|\|\|\|\|\|\|\|\|\|\|\|\|\|\|\|\|\|\|\|\|\|\|\|\|\|\|\|\|\| | |
| 151 | FLGSGGFIGYAPNLSKLVAEWEGQDSDSDQLFYTKIFLDPEKREQINITL | 200 |
| | . . . . . | |
| 201 | DHRCRIFQNLDGALVSPWGQGHLPGACYELTASVLTSELSVMPSFPAVV. | 249 |
| | \|\|\|\|\|\|\|\|\|\|\|\|\|\| \|\| | |
| 201 | DHRCRIFQNLDGAL...............................DEVVL | 219 |
| | . . . . . | |
| 250 | ............................LQLNYLGNYIPRFWTFETGCTV | 271 |
| | \|\|\|\|\|\|\|\|\|\|\|\|\|\|\|\|\|\|\|\|\|\|\|\|\|\|\|\|\|\|\|\|\|\|\|\|\|\|\|\|\|\|\|\|\|\|\|\|\|\| | |
| 220 | KFEMGHVRARNLAYDTLPVLIHGNGPTKLQLNYLGNYIPRFWTFETGCTV | 269 |
| | . . . . . | |
| 272 | CDEGLRSLKGIGDEALPTVLVGVFIEQPTPFVSLFFQRLLRLHYPQKHMR | 321 |
| | \|\|\|\|\|\|\|\|\|\|\|\|\|\|\|\|\|\|\|\|\|\|\|\|\|\|\|\|\|\|\|\|\|\|\|\|\|\|\|\|\|\|\|\|\|\|\|\|\|\| | |
| 270 | CDEGLRSLKGIGDEALPTVLVGVFIEQPTPFVSLFFQRLLRLHYFQKHMR | 319 |
| | . . . . . | |
| 322 | LFIHNHEQHHKAQVEEFLAQHGSEYQSVKLVGPEVRMANADARNMGADLC | 371 |
| | \|\|\|\|\|\|\|\|\|\|\|\|\|\|\|\|\|\|\|\|\|\|\|\|\|\|\|\|\|\|\|\|\|\|\|\|\|\|\|\|\|\|\|\|\|\|\|\|\|\| | |
| 320 | LFIHNHEQHHKAQVEEFLAQHGSEYQSVKLVGPEVRMANADARNMGADLC | 369 |
| | . . . . . | |
| 372 | RQDRSCTYYFSVDADVALTEPNSLRLLIQQNKNVIAPLMTRHGRLWSNFW | 421 |
| | \|\|\|\|\|\|\|\|\|\|\|\|\|\|\|\|\|\|\|\|\|\|\|\|\|\|\|\|\|\|\|\|\|\|\|\|\|\|\|\|\|\|\|\|\|\|\|\|\|\| | |
| 370 | RQDRSCTYYFSVDADVALTEPNSLRLLIQQNKNVIAPLMTRHGRLWSNFW | 419 |
| | . . . . . | |
| 422 | GALSADGYYARSEDYVDIVQGRRVGVWNVPYISNIYLIKGSALRGELQSS | 471 |
| | \|\|\|\|\|\|\|\|\|\|\|\|\|\|\|\|\|\|\|\|\|\|\|\|\|\|\|\|\|\|\|\|\|\|\|\|\|\|\|\|\|\|\|\|\|\|\|\|\|\| | |
| 420 | GALSADGYYARSEDYVDIVQGRRVGVWNVPYISNIYLIKGSALRGELQSS | 469 |
| | . . . . . | |
| 472 | DLFHHSKLDPDMAFCANIRQQDVFNFLTNRHTLGHLLSLDSYRTTHLHND | 521 |
| | \|\|\|\|\|\|\|\|\|\|\|\|\|\|\|\|\|\|\|\|\|\|\|\|\|\|\|\|\|\|\|\|\|\|\|\|\|\|\|\|\|\|\|\|\|\|\|\|\|\| | |
| 470 | DLFHHSKLDPDMAFCANIRQQDVFMFLTNRHTLGHLLSLDSYRTTHLHND | 519 |
| | . . . . . | |
| 522 | LWEVFSNPEDWKEKYIHQNYTKALAGKLVETPCPDVYWFPIFTEVACDEL | 571 |
| | \|\|\|\|\|\|\|\|\|\|\|\|\|\|\|\|\|\|\|\|\|\|\|\|\|\|\|\|\|\|\|\|\|\|\|\|\|\|\|\|\|\|\|\|\|\|\|\|\|\| | |
| 520 | LWEVFSNPEDWKEKYIHQNYTKALAGKLVETPCPDVYWFPIFTEVACDEL | 569 |
| | . . . . . | |
| 572 | VEEMEHFGQWSLGNNKDNRIQGGYENVPTIDIHMNQIGFEREWHKFLLEY | 621 |
| | \|\|\|\|\|\|\|\|\|\|\|\|\|\|\|\|\|\|\|\|\|\|\|\|\|\|\|\|\|\|\|\|\|\|\|\|\|\|\|\|\|\|\|\|\|\|\|\|\|\| | |
| 570 | VEEMEHFGQWSLGNNKDNRIQGGYENVPTIDIHMNQIGFEREWHKFLLEY | 619 |
| | . . . . . | |
| 622 | IAPMTEKLYPGYYTRAQFDLAFVVRYKPDEQPSLMPHHDASTFTINIALN | 671 |
| | \|\|\|\|\|\|\|\|\|\|\|\|\|\|\|\|\|\|\|\|\|\|\|\|\|\|\|\|\|\|\|\|\|\|\|\|\|\|\|\|\|\|\|\|\|\|\|\|\|\| | |
| 620 | IAPMTEKLYPGYYTRAQFDLAFVVRYKPDEQPSLMPHHDASTFTINIALN | 669 |
| | . . . . . | |
| 672 | RVGVDYEGGGCRFLRYNCSIRAPRKGWTLMHPGRLTHYHEGLPTTRGTRY | 721 |
| | \|\|\|\|\|\|\|\|\|\|\|\|\|\|\|\|\|\|\|\|\|\|\|\|\|\|\|\|\|\|\|\|\|\|\|\|\|\|\|\|\|\|\|\|\|\|\|\|\|\| | |
| 670 | RVGVDYEGGGCRFLRYNCSIRAPRKGWTLMHPGRLTHYHEGLPTTRGTRY | 719 |
| 722 | IAVSFVDP | 729 |
| | \|\|\|\|\|\|\|\| | |
| 720 | IAVSFVDP | 727 |

| Sequence name: PLO1_HUMAN_V1 (SEQ ID NO:368) | | | |
|---|---|---|---|
| Sequence documentation: | | | |
| Alignment of: HUMLYSYL_PEA_1 P13 (SEQ ID NO:374) × | | | |
| PLO1_HUMAN_V1 (SEQ ID NO:368) . . | | | |
| Alignment segment 1/1: | | | |
| Quality: | 5773.00 | Escore: | 0 |
| Matching length: | 585 | Total length: | 585 |
| Matching Percent | 100.00 | Matching Percent | 100.00 |
| Similarity: | | Identity: | |
| Total Percent | 100.00 | Total Percent | 100.00 |
| Similarity: | | Identity: | |
| Gaps: | 0 | | |

| Alignment: | | |
|---|---|---|
| | . . . . . | |
| 1 | MRPLLLLALLGWLLLAEAKGDAKPEDNLLVLTVATKETEGFRRFKRSAQF | 50 |
| | \|\|\|\|\|\|\|\|\|\|\|\|\|\|\|\|\|\|\|\|\|\|\|\|\|\|\|\|\|\|\|\|\|\|\|\|\|\|\|\|\|\|\|\|\|\|\|\|\|\| | |
| 1 | MRPLLLLALLGWLLLAEAKGDAKPEDNLLVLTVATKETEGFRRFKRSAQF | 50 |
| | . . . . . | |
| 51 | FNYKIQALGLGEDWNVEKGTSAGGGQKVRLLKKALEKHADKEDLVILFAD | 100 |
| | \|\|\|\|\|\|\|\|\|\|\|\|\|\|\|\|\|\|\|\|\|\|\|\|\|\|\|\|\|\|\|\|\|\|\|\|\|\|\|\|\|\|\|\|\|\|\|\|\|\| | |
| 51 | FNYKIQALGLGEDWNVEKGTSAGGGQKVRLLKKALEKHADKEDLVILFAD | 100 |
| | . . . . . | |
| 101 | SYDVLFASGPRELLKKFRQARSQVVFSAEELIYPDRRLETKYPVVSDGKR | 150 |
| | \|\|\|\|\|\|\|\|\|\|\|\|\|\|\|\|\|\|\|\|\|\|\|\|\|\|\|\|\|\|\|\|\|\|\|\|\|\|\|\|\|\|\|\|\|\|\|\|\|\| | |
| 101 | SYDVLFASGPRELLKKFRQARSQVVFSAEELIYPDRRLETKYPVVSDGKR | 150 |
| | . . . . . | |
| 151 | FLGSGGFIGYAPNLSKLVAEWEGQDSDSDQLFYTKIFLDPEKREQINITL | 200 |
| | \|\|\|\|\|\|\|\|\|\|\|\|\|\|\|\|\|\|\|\|\|\|\|\|\|\|\|\|\|\|\|\|\|\|\|\|\|\|\|\|\|\|\|\|\|\|\|\|\|\| | |
| 151 | FLGSGGFIGYAPNLSKLVAEWEGQDSDSDQLFYTKIFLDPEKREQINITL | 200 |
| | . . . . . | |
| 201 | DHRCRIFQNLDGALDEVVLKFEMGHVRARNLAYDTLPVLIHGNGPTKLQL | 250 |
| | \|\|\|\|\|\|\|\|\|\|\|\|\|\|\|\|\|\|\|\|\|\|\|\|\|\|\|\|\|\|\|\|\|\|\|\|\|\|\|\|\|\|\|\|\|\|\|\|\|\| | |
| 201 | DHRCRIFQNLDGALDEVVLKFEMGHVRARNLAYDTLPVLIHGNGPTELQL | 250 |
| | . . . . . | |
| 251 | NYLGNYIPRFWTFETGCTVCDEGLRSLKGIGDEALPTVLVGVFIEQPTPF | 300 |
| | \|\|\|\|\|\|\|\|\|\|\|\|\|\|\|\|\|\|\|\|\|\|\|\|\|\|\|\|\|\|\|\|\|\|\|\|\|\|\|\|\|\|\|\|\|\|\|\|\|\| | |
| 251 | NYLGNYIPRFWTFETGCTVCDEGLRSLKGIGDEALPTVLVGVFIEQPTPF | 300 |
| | . . . . . | |
| 301 | VSLFFQRLLRLHYPQKHMRLFIHNHEQHHKAQVEEFLAQHGSEYQSVKLV | 350 |
| | \|\|\|\|\|\|\|\|\|\|\|\|\|\|\|\|\|\|\|\|\|\|\|\|\|\|\|\|\|\|\|\|\|\|\|\|\|\|\|\|\|\|\|\|\|\|\|\|\|\| | |
| 301 | VSLFFQRLLRLHYPQKHMRLFIHNHEQHHKAQVEEFLAQHGSEYQSVKLV | 350 |
| | . . . . . | |
| 351 | GPEVRMANADARNMGADLCRQDRSCTYYFSVDADVALTEPNSLRLLIQQN | 400 |
| | \|\|\|\|\|\|\|\|\|\|\|\|\|\|\|\|\|\|\|\|\|\|\|\|\|\|\|\|\|\|\|\|\|\|\|\|\|\|\|\|\|\|\|\|\|\|\|\|\|\| | |
| 351 | GPEVRMANADARNMGADLCRQDRSCTYYFSVDADVALTEPNSLRLLIQQN | 400 |
| | . . . . . | |
| 401 | KNVIAPLMTRHGRLWSNFWGALSADGYYARSEDYVDIVQGRRVGVWNVPY | 450 |
| | \|\|\|\|\|\|\|\|\|\|\|\|\|\|\|\|\|\|\|\|\|\|\|\|\|\|\|\|\|\|\|\|\|\|\|\|\|\|\|\|\|\|\|\|\|\|\|\|\|\| | |
| 401 | KNVIAPLMTRHGRLWSNFWGALSADGYYARSEDYVDIVQGRRVGVWNVPY | 450 |
| | . . . . . | |
| 451 | ISNIYLIKGSALRGELQSSDLFHHSKLDPDMAFCANIRQQDVFMFLTNRH | 500 |
| | \|\|\|\|\|\|\|\|\|\|\|\|\|\|\|\|\|\|\|\|\|\|\|\|\|\|\|\|\|\|\|\|\|\|\|\|\|\|\|\|\|\|\|\|\|\|\|\|\|\| | |
| 451 | ISNIYLIKGSALRGELQSSDLFHHSKLDPDMAFCANIRQQDVFMFLTNRH | 500 |
| | . . . . . | |
| 501 | TLGHLLSLDSYRTTHLHNDLWEVFSNPEDWKEKYIHQNYTKALAGKLVET | 550 |
| | \|\|\|\|\|\|\|\|\|\|\|\|\|\|\|\|\|\|\|\|\|\|\|\|\|\|\|\|\|\|\|\|\|\|\|\|\|\|\|\|\|\|\|\|\|\|\|\|\|\| | |
| 501 | TLGHLLSLDSYRTTHLHNDLWEVFSNPEDWKEKYIHQNYTKALAGKLVET | 550 |
| | . . . | |
| 551 | PCPDVYWFPIFTEVACDELVEEMEHFGQWSLGNNK | 585 |
| | \|\|\|\|\|\|\|\|\|\|\|\|\|\|\|\|\|\|\|\|\|\|\|\|\|\|\|\|\|\|\|\|\|\|\| | |
| 551 | PCPDVYWFPIFTEVACDELVEEMEHFGQWSLGNNK | 585 |

Sequence name: PLO1_HUMAN_V1 (SEQ ID NO:368)
Sequence documentation:
Alignment of: HUMLYSYL_PEA_1_P14 (SEQ ID NO:375) ×
PLO1_HUMAN_V1 (SEQ ID NO: 368) . .
Alignment segment 1/1:

| | | | |
|---|---|---|---|
| +TL,Quality: | 5773.00 | Escore: | 0 |
| Matching length: | 585 | Total length: | 585 |
| Matching Percent | 100.00 | Matching Percent | 100.00 |
| Similarity: | | Identity: | |
| Total Percent | 100.00 | Total Percent | 100.00 |
| Similarity: | | Identity: | |
| Gaps: | 0 | | |

| Alignment: | | |
|---|---|---|
| | . . . . . | |
| 1 | MRPLLLLALLGWLLLAEAKGDAKPEDNLLVLTVATKETEGFRRFKRSAQF | 50 |
| | \|\|\|\|\|\|\|\|\|\|\|\|\|\|\|\|\|\|\|\|\|\|\|\|\|\|\|\|\|\|\|\|\|\|\|\|\|\|\|\|\|\|\|\|\|\|\|\|\|\| | |
| 1 | MRPLLLLALLGWLLLAEAKGDAKPEDNLLVLTVATKETEGFRRFKRSAQF | 50 |
| | . . . . . | |
| 51 | FNYKIQALGLGEDWNVEKGTSAGGGQKVRLLKKALEKHADKEDLVILFAD | 100 |
| | \|\|\|\|\|\|\|\|\|\|\|\|\|\|\|\|\|\|\|\|\|\|\|\|\|\|\|\|\|\|\|\|\|\|\|\|\|\|\|\|\|\|\|\|\|\|\|\|\|\| | |
| 51 | FNYKIQALGLGEDWNVEKGTSAGGGQKVRLLKKALEKHADKEDLVILFAD | 100 |
| | . . . . . | |
| 101 | SYDVLFASGPRELLKKFRQARSQVVFSAEELIYPDRRLETKYPVVSDGKR | 150 |
| | \|\|\|\|\|\|\|\|\|\|\|\|\|\|\|\|\|\|\|\|\|\|\|\|\|\|\|\|\|\|\|\|\|\|\|\|\|\|\|\|\|\|\|\|\|\|\|\|\|\| | |
| 101 | SYDVLFASGPRELLKKFRQARSQVVFSAEELIYPDRRLETKYPVVSDGKR | 150 |
| | . . . . . | |
| 151 | FLGSGGFIGYAPNLSKLVAEWEGQDSDSDQLFYTKIFLDPEKREQINITL | 200 |
| | \|\|\|\|\|\|\|\|\|\|\|\|\|\|\|\|\|\|\|\|\|\|\|\|\|\|\|\|\|\|\|\|\|\|\|\|\|\|\|\|\|\|\|\|\|\|\|\|\|\| | |
| 151 | FLGSGGFIGYAPNLSKLVAEWEGQDSDSDQLFYTKIFLDPEKREQINITL | 200 |
| | . . . . . | |
| 201 | DHRCRIFQNLDGALDEVVLKFEMGHVRARNLAYDTLPVLIHGNGPTKLQL | 250 |
| | \|\|\|\|\|\|\|\|\|\|\|\|\|\|\|\|\|\|\|\|\|\|\|\|\|\|\|\|\|\|\|\|\|\|\|\|\|\|\|\|\|\|\|\|\|\|\|\|\|\| | |
| 201 | DHRCRIFQNLDGALDEVVLKFEMGHVRARNLAYDTLPVLIHGNGPTKLQL | 250 |
| | . . . . . | |
| 251 | NYLGNYIPRFWTFETGCTVCDEGLRSLKGIGDEALPTVLVGVFIEQPTPF | 300 |
| | \|\|\|\|\|\|\|\|\|\|\|\|\|\|\|\|\|\|\|\|\|\|\|\|\|\|\|\|\|\|\|\|\|\|\|\|\|\|\|\|\|\|\|\|\|\|\|\|\|\| | |
| 251 | NYLGNYIPRFWTFETGCTVCDEGLRSLKGIGDEALPTVLVGVFIEQPTPF | 300 |
| | . . . . . | |
| 301 | VSLFFQRLLRLHYPQKHMRLFIHNHEQHHKAQVEEFLAQHGSEYQSVKLV | 350 |
| | \|\|\|\|\|\|\|\|\|\|\|\|\|\|\|\|\|\|\|\|\|\|\|\|\|\|\|\|\|\|\|\|\|\|\|\|\|\|\|\|\|\|\|\|\|\|\|\|\|\| | |
| 301 | VSLFFQRLLRLHYPQKHMRLFIHNHEQHHKAQVEEFLAQHGSEYQSVKLV | 350 |
| | . . . . . | |
| 351 | GPEVRMANADARNMGADLCRQDRSCTYYFSVDADVALTEPNSLRLLIQQN | 400 |
| | \|\|\|\|\|\|\|\|\|\|\|\|\|\|\|\|\|\|\|\|\|\|\|\|\|\|\|\|\|\|\|\|\|\|\|\|\|\|\|\|\|\|\|\|\|\|\|\|\|\| | |
| 351 | GPEVRMANADARNMGADLCRQDRSCTYYFSVDADVALTEPNSLRLLIQQN | 400 |
| | . . . . . | |
| 401 | KNVIAPLMTRHGRLWSNFWGALSADGYYARSEDYVDIVQGRRVGVWNVPY | 450 |
| | \|\|\|\|\|\|\|\|\|\|\|\|\|\|\|\|\|\|\|\|\|\|\|\|\|\|\|\|\|\|\|\|\|\|\|\|\|\|\|\|\|\|\|\|\|\|\|\|\|\| | |
| 401 | KNVIAPLMTRHGRLWSNFWGALSADGYYARSEDYVDIVQGRRVGVWNVPY | 450 |
| | . . . . . | |
| 451 | ISNIYLIKGSALRGELQSSDLFHHSKLDPDMAFCANIRQQDVFMFLTNRH | 500 |
| | \|\|\|\|\|\|\|\|\|\|\|\|\|\|\|\|\|\|\|\|\|\|\|\|\|\|\|\|\|\|\|\|\|\|\|\|\|\|\|\|\|\|\|\|\|\|\|\|\|\| | |
| 451 | ISNIYLIKGSALRGELQSSDLFHHSKLDPDMAFCANIRQQDVFNFLTNRH | 500 |
| | . . . . . | |
| 501 | TLGHLLSLDSYRTTHLHNDLWEVFSNPEDWKEKYIHQNYTKALAGKLVET | 550 |
| | \|\|\|\|\|\|\|\|\|\|\|\|\|\|\|\|\|\|\|\|\|\|\|\|\|\|\|\|\|\|\|\|\|\|\|\|\|\|\|\|\|\|\|\|\|\|\|\|\|\| | |
| 501 | TLGHLLSLDSYRTTHLHNDLWEVFSNPEDWKEKYIHQNYTKALAGKLVET | 550 |
| | . . . | |
| 551 | PCPDVYWFPIFTEVACDELVEEMEHFGQWSLGNNK | 585 |
| | \|\|\|\|\|\|\|\|\|\|\|\|\|\|\|\|\|\|\|\|\|\|\|\|\|\|\|\|\|\|\|\|\|\|\| | |
| 551 | PCPDVYWFPIFTEVACDELVEEMEHFGQWSLGNNK | 585 |

| Sequence name: PLO1_HUMAN_V1 (SEQ ID NO:368) | | | |
|---|---|---|---|
| Sequence documentation: | | | |
| Alignment of: HUMLYSYL_PEA_1_P16 (SEQ ID NO:376) × | | | |
| PLO1_HUMAN_V1 (SEQ ID NO:368) . . | | | |
| Alignment segment 1/1: | | | |
| Quality: | 5400.00 | Escore: | 0 |
| Matching length: | 550 | Total length: | 550 |
| Matching Percent | 100.00 | Matching Percent | 100.00 |
| Similarity: | | Identity: | |
| Total Percent | 100.00 | Total Percent | 100.00 |
| Similarity: | | Identity: | |
| Gaps: | 0 | | |

| Alignment: | | |
|---|---|---|
| | . . . . . | |
| 1 | MRPLLLLALLGWLLLAEAKGDAKPEDNLLVLTVATKETEGFRRFKRSAQF | 50 |
| | \|\|\|\|\|\|\|\|\|\|\|\|\|\|\|\|\|\|\|\|\|\|\|\|\|\|\|\|\|\|\|\|\|\|\|\|\|\|\|\|\|\|\|\|\|\|\|\|\|\| | |
| 1 | MRPLLLLALLGWLLLAEAKGDAKPEDNLLVLTVATKETEGFRRFKRSAQF | 50 |
| | . . . . . | |
| 51 | FNYKIQALGLGEDWNVEKGTSAGGGQKVRLLKKALEKHADKEDLVILFAD | 100 |
| | \|\|\|\|\|\|\|\|\|\|\|\|\|\|\|\|\|\|\|\|\|\|\|\|\|\|\|\|\|\|\|\|\|\|\|\|\|\|\|\|\|\|\|\|\|\|\|\|\|\| | |
| 51 | FNYKIQALGLGEDWNVEKGTSAGGGQKVRLLKKALEKHADKEDLVILFAD | 100 |
| | . . . . . | |
| 101 | SYDVLFASGPRELLKKFRQARSQVVFSAEELIYPDRRLETKYPVVSDGKR | 150 |
| | \|\|\|\|\|\|\|\|\|\|\|\|\|\|\|\|\|\|\|\|\|\|\|\|\|\|\|\|\|\|\|\|\|\|\|\|\|\|\|\|\|\|\|\|\|\|\|\|\|\| | |
| 101 | SYDVLFASGPRELLKKFRQARSQVVFSAEELIYPDRRLETKYFVVSDGKR | 150 |
| | . . . . . | |
| 151 | FLGSGGFIGYAPNLSKLVAEWEGQDSDSDQLFYTKIFLDPEKREQINITL | 200 |
| | \|\|\|\|\|\|\|\|\|\|\|\|\|\|\|\|\|\|\|\|\|\|\|\|\|\|\|\|\|\|\|\|\|\|\|\|\|\|\|\|\|\|\|\|\|\|\|\|\|\| | |
| 151 | FLGSGGFIGYAPNLSKLVAEWEGQDSDSDQLFYTKIFLDPEKREQINITL | 200 |
| | . . . . . | |
| 201 | DHRCRIFQNLDGALDEVVLKFEMGHVRARNLAYDTLPVLIHGNGPTKLQL | 250 |
| | \|\|\|\|\|\|\|\|\|\|\|\|\|\|\|\|\|\|\|\|\|\|\|\|\|\|\|\|\|\|\|\|\|\|\|\|\|\|\|\|\|\|\|\|\|\|\|\|\|\| | |
| 201 | DHRCRIFQNLDGALDEVVLKFEMGHVRARNLAYDTLPVLIHGNGPTKLQL | 250 |
| | . . . . . | |
| 251 | NYLGNYIPRFWTFETGCTVCDEGLRSLKGIGDEALPTVLVGVFIEQPTPF | 300 |
| | \|\|\|\|\|\|\|\|\|\|\|\|\|\|\|\|\|\|\|\|\|\|\|\|\|\|\|\|\|\|\|\|\|\|\|\|\|\|\|\|\|\|\|\|\|\|\|\|\|\| | |
| 251 | NYLGNYIPRFWTFETGCTVCDEGLRSLKGIGDEALPTVLVGVFIEQPTPF | 300 |
| | . . . . . | |
| 301 | VSLFFQRLLRLHYPQKHMRLFIHNHEQHHKAQVEEFLAQHGSEYQSVKLV | 350 |
| | \|\|\|\|\|\|\|\|\|\|\|\|\|\|\|\|\|\|\|\|\|\|\|\|\|\|\|\|\|\|\|\|\|\|\|\|\|\|\|\|\|\|\|\|\|\|\|\|\|\| | |
| 301 | VSLFFQRLLRLHYPQKHMRLFIHNHEQHHKAQVEEFLAQHGSEYQSVKLV | 350 |
| | . . . . . | |
| 351 | GPEVRMANADARNMGADLCRQDRSCTYYFSVDADVALTEPNSLRLLIQQN | 400 |
| | \|\|\|\|\|\|\|\|\|\|\|\|\|\|\|\|\|\|\|\|\|\|\|\|\|\|\|\|\|\|\|\|\|\|\|\|\|\|\|\|\|\|\|\|\|\|\|\|\|\| | |
| 351 | GPEVRMANADARNMGADLCRQDRSCTYYFSVDADVALTEPNSLRLLIQQN | 400 |
| | . . . . . | |
| 401 | KNVIAPLMTRXGRLWSNFWGALSADGYYARSEDYVDIVQGRRVGVWNVPY | 450 |
| | \|\|\|\|\|\|\|\|\|\|\|\|\|\|\|\|\|\|\|\|\|\|\|\|\|\|\|\|\|\|\|\|\|\|\|\|\|\|\|\|\|\|\|\|\|\|\|\|\|\| | |
| 401 | KNVIAPLMTRHGRLWSNFWGALSADGYYARSEDYVDIVQGRRVGVWNVPY | 450 |
| | . . . . . | |
| 451 | ISNIYLIKGSALRGELQSSDLFHHSKLDPDMAFCANIRQQDVFMFLTNRH | 500 |
| | \|\|\|\|\|\|\|\|\|\|\|\|\|\|\|\|\|\|\|\|\|\|\|\|\|\|\|\|\|\|\|\|\|\|\|\|\|\|\|\|\|\|\|\|\|\|\|\|\|\| | |
| 451 | ISNIYLIKGSALRGELQSSDLFHHSKLDPDMAFCANIRQQDVFMFLTNRH | 500 |
| | . . . . . | |
| 501 | TLGHLLSLDSYRTTHLHNDLWEVFSNPEDWKEKYIHQNYTKALAGKLVET | 550 |
| | \|\|\|\|\|\|\|\|\|\|\|\|\|\|\|\|\|\|\|\|\|\|\|\|\|\|\|\|\|\|\|\|\|\|\|\|\|\|\|\|\|\|\|\|\|\|\|\|\|\| | |
| 501 | TLGHLLSLDSYRTTHLHNDLWEVFSNPEDWKEKYIHQNYTKALAGKLVET | 550 |

| Sequence name: PLO1_HUMAN_V1 (SEQ ID NO:368) | | | |
|---|---|---|---|
| Sequence documentation: | | | |
| Alignment of: HUMLYSYL_PEA_1_P24 (SEQ ID NO:378) × | | | |
| PLO1_HUMAN_V1 (SEQ ID NO:368) . . | | | |
| Alignment segment 1/1: | | | |
| Quality: | 1850.00 | Escore: | 0 |
| Matching length: | 193 | Total length: | 193 |
| Matching Percent | 100.00 | Matching Percent | 100.00 |
| Similarity: | | Identity: | |
| Total Percent | 100.00 | Total Percent | 100.00 |
| Similarity: | | Identity: | |
| Gaps: | 0 | | |

| Alignment: | | |
|---|---|---|
| | . . . . . | |
| 1 | MRPLLLLALLGWLLLAEAKGDAKPEDNLLVLTVATKETEGFRRFKRSAQF | 50 |
| | \|\|\|\|\|\|\|\|\|\|\|\|\|\|\|\|\|\|\|\|\|\|\|\|\|\|\|\|\|\|\|\|\|\|\|\|\|\|\|\|\|\|\|\|\|\|\|\|\|\| | |
| 1 | MRPLLLLALLGWLLLAEAKGDAKPEDNLLVLTVATKETEGFRRFKRSAQF | 50 |
| | . . . . . | |
| 51 | FNYKIQALGLGEDWNVEKGTSAGGGQKVRLLKKALEKHADKEDLVILFAD | 100 |
| | \|\|\|\|\|\|\|\|\|\|\|\|\|\|\|\|\|\|\|\|\|\|\|\|\|\|\|\|\|\|\|\|\|\|\|\|\|\|\|\|\|\|\|\|\|\|\|\|\|\| | |
| 51 | FNYKIQALGLGEDWNVEKGTSAGGGQKVRLLKKALEKHADKEDLVILFAD | 100 |
| | . . . . . | |
| 101 | SYDVLFASGPRELLKKFRQARSQVVFSAEELIYPDRRLETKYPVVSDGKR | 150 |
| | \|\|\|\|\|\|\|\|\|\|\|\|\|\|\|\|\|\|\|\|\|\|\|\|\|\|\|\|\|\|\|\|\|\|\|\|\|\|\|\|\|\|\|\|\|\|\|\|\|\| | |
| 101 | SYDVLFASGPRELLKKFRQARSQVVFSAEELIYPDRRLETKYPVVSDGKR | 150 |
| | . . . . | |
| 151 | FLGSGGFIGYAPNLSKLVAEWEGQDSDSDQLFYTKIFLDPEKR | 193 |
| | \|\|\|\|\|\|\|\|\|\|\|\|\|\|\|\|\|\|\|\|\|\|\|\|\|\|\|\|\|\|\|\|\|\|\|\|\|\|\|\|\|\|\| | |
| 151 | FLGSGGFIGYAPNLSKLVAEWEGQDSDSDQLFYTKIFLDPEKR | 193 |

### Additional Examples of Endometrial Markers

[1196] The present invention also encompasses additional examples of markers that are suitable for use with endometriosis. These markers relate to the chordin-like-2 (CHL2) family of variants that was discovered by the present applicants. These variants are disclosed in PCT Application No. WO 01/34796 and in PCT Application No. IL2004/000735, both of which are hereby incorporated by reference as if fully set forth herein. Preferably, these markers are serum markers but optionally they are immunohistochemistry markers. They are useful for diagnosis with any suitable biological, including but not limited to the examples listed previously.

[1197] As previously published by the present applicants (Oren et al, Gene. 2004 Apr. 28; 331:17-31), these variants bind Activin A specifically (and not BMP-2, 4, 6 as other members of the chordin family). By the literature, Activin A is associated with endometriosis. For example, there is evidence for local production and secretion of Activin A in ovarian endometriotic cysts (Reis et al, Fertil Steril. 2001 February; 75(2):367-73; Florio et al, Steroids. 2003 November; 68(10-13):801-7). All of these references are hereby incorporated by reference as if fully set forth herein. A brief description of these sequences is provided below.

[1198] Chordin is an abundant glycoprotein, and is a secreted protein of 955 amino acids (aa) with a molecular mass of 120 Kda. It is a key developmental protein that dorsalizes early vertebrate embryonic tissues by binding to ventralizing TGF-beta-like bone morphogenic proteins (BMP) and sequestering them in latent complexes. BMPs participate in a broad spectrum of cellular inducing events involving all three germ layers during metazoan development. Chordin binds to ventral BMP-2 and BMP-4 signals in the extracellular space, blocking the interaction of BMPs with their receptors. Chordin mimics the action of the Spemann organizer and can induce the formation of neural tissue from ectoderm and dorsalization of the ventral mesoderm to form muscle.

[1199] During early embryogenesis of vertebrates and invertebrates, antagonism between BMPs and several unrelated proteins is a general mechanism by which the dorso-ventral axis is established. One of these extracellular antagonists is Chordin, which binds with high affinity to certain BMPs, preventing their interaction with their cognate cell surface receptors. Chordin plays a role in dorso-ventral axis formation and induction, as well as in maintenance and differentiation of neural tissues in early vertebrate embryogenesis. The inhibitory activity of Chordin on BMPs is mediated by binding through specific domains named Cysteine-Rich (CR) repeats.

[1200] The conservation of each specific CR repeat between Chordin orthologs in different species is higher than that of different CRs within a particular ortholog. The individual CR repeats in Chordin vary in their binding affinity to BMPs, but they function cooperatively in the full-length protein.

[1201] Several alternatively spliced transcripts have been reported for the human Chordin gene. These variants were found to be differentially expressed in various tissues, and code for C-truncated isoforms of the Chordin protein that vary in their content of CR repeats and in their biological activity as BMP antagonists.

[1202] A New Chordin-like protein (CHL) was recently reported. CHL also binds and inhibits BMP activity. During embryogenesis and organogenesis, Chordin and CHL display distinct spatiotemporal expression patterns. Several splicing variants of mouse and human CHL have been reported which differ primarily in the length and sequence of their C-termini.

[1203] CHL has been shown to be secreted and to bind BMPs and other TGFb superfamily members. Expression patterns as well as functional studies in mouse, chicken and xenopus, indicate that it may function as a modulator of BMP signaling during embryonic development.

[1204] Recently, another chordin-like protein, which is structurally most homologous to CHL/neuralin/ventroptin, was identified (Development, 2004 January; 131(1):229-40. Epub 2003 Dec. 03.). When injected into Xenopus embryos, RNA of this protein induced a secondary dorso-ventral axis. Recombinant protein interacted directly with BMPs in a competitive manner to prevent binding to the type I BMP receptor ectodomain, and inhibited BMP-dependent induction of alkaline phosphatase in C2Cl2 cells. Thus, this protein behaves as a secreted BMP-binding inhibitor. In situ hybridization revealed that expression of this protein is restricted to chondrocytes of various developing joint cartilage surfaces and connective tissues in reproductive organs. Adult mesenchymal progenitor cells expressed this protein, and its levels decreased during chondrogenic differentiation. Addition of this protein to a chondrogenic culture system reduced cartilage matrix deposition. Consistently, protein transcripts were weakly detected in normal adult joint cartilage. However, its expression was upregulated in middle zone chondrocytes in osteoarthritic joint cartilage (where hypertrophic markers are induced). This protein depressed chondrocyte mineralization when added during the hypertrophic differentiation of cultured hyaline cartilage particles. Thus, this protein may play negative roles in the (re)generation and maturation of articular chondrocytes in the hyaline cartilage of both developing and degenerated joints.

[1205] A novel member of the Chordin-like protein family was identified and characterized by the present applicant in human and in mouse (PCT Application No. WO 01/34796, hereby incorporated by reference as if fully set forth herein). This novel protein, named CLH, shows high similarity to the recently reported CHL protein, also named Neuralin-1 or Ventroptin. For the sake of clarity, CLH will be referred to here as CHL2, since it is most closely related to the CHL sequence reported by Nakayama et al.

[1206] The high level of homology between CHL2 and CHL is reflected not only in the protein sequence, for example with regard to the number and location of the CR repeats (two adjacent repeats at the N′-terminus, and a third one further downstream), and the absence of other recognizable protein domains, but also in the gene structure, number and size of exons and the spacing of the CR repeats within the exons. Further characterization of CHL2 revealed ubiquitous expression in a variety of tissues and complex alternative splicing, resulting in differentially expressed CHL2 isoforms that differ in their C-termini, the presence of a signal peptide, and the content of their CR repeats.

[1207] It has been postulated that Chordin may be expressed by cells of the osteoblast lineage to limit BMP actions in osteoblasts. This may suggest an important function for Chordin as a BMP binding protein since excessive BMP-4 has been implicated in pathogenesis of Fibrodysplasia Ossificans Progressiva (FOP). FOP is a rare genetic disease in which muscles, tendons, ligaments and other connective tissues may ossify into bone. BMPs can cause induction of noggin and Chordin mRNA and protein levels in skeletal cells by transcriptional mechanisms, and these, in turn, prevent the effect of BMPs in osteoblasts in a negative-feedback mechanism. The induction of these proteins by BMPs appears to be a mechanism to limit the BMP effect in bones. Existing therapies which are being investigated for their effectiveness in preventing heterotopic bone formation include inhibitors of BMPs.

[1208] The Chordin-like protein 2 (CHL2) variants according to the present invention are useful for diagnosis of endometriosis, as markers. These markers may optionally comprise an isolated nucleic acid molecule comprising the sequence of any one of SEQ ID NO: 379 to SEQ ID NO: 383, fragments of said sequences having at least 20 nucleic acids, or a molecule comprising a sequence having at least 80%, preferably 90%, and most preferably 95% or 98% identity to any one of SEQ ID NO:379 to SEQ ID NO: 383, as well as sequences complementary thereto and/or capable of hybridizing therewith, preferably under moderate to stringent conditions (described above). Optionally and more preferably, a nucleic acid molecule comprising or consisting of a non-coding sequence which is complementary to that of any one of SEQ ID NO: 379 to SEQ ID NO: 383, or complementary to a sequence having at least 80%, preferably 90%, most preferably 95% or 98% identity to said sequences or a fragment of said sequences. The complementary sequence may be a DNA sequence which hybridizes to any one of the sequences of SEQ ID NO: 379 to SEQ ID NO: 383, or hybridizes to a portion of these sequences which includes the “unique” sequences or bridges, and which has a length sufficient to inhibit the transcription of any one of the sequences of SEQ ID NO:379 to SEQ ID NO:383. The complementary sequence may be a DNA sequence which can be transcribed into an mRNA being an antisense of the mRNA transcribed from any one of SEQ ID NO: 379 to SEQ ID NO: 383 amend or into an mRNA which is an antisense to a fragment of the mRNA transcribed from any one of SEQ ID NO: 379 to SEQ ID NO: 383 which has a length sufficient to hybridize with the mRNA transcribed from any one of SEQ ID NO: 379 to SEQ ID NO: 383, so as to inhibit its translation. The complementary sequence may also be the mRNA or the fragment of the mRNA itself.

[1209] These markers may optionally comprise a protein or polypeptide comprising or consisting of an amino acid sequence encoded by any of the above nucleic acid sequences, termed herein “CHL2 product”, for example, an amino acid sequence having the sequence in any one of SEQ ID NO: 389 to 393, fragments of the above amino acid sequences having a length of at least 10 amino acids, as well as homologues of the amino acid sequences of any one of SEQ ID NO: 389 to 393 in which one or more of the amino acid residues has been substituted (by conservative or non-conservative substitution) added, deleted, or chemically modified.

[1210] Markers according to the present invention may also optionally comprise nucleic acid molecule comprising or consisting of a sequence which encodes the above amino acid sequences (including the fragments and analogs of the amino acid sequences). Due to the degenerative nature of the genetic code, a plurality of alternative nucleic acid sequences, beyond SEQ ID NO: 379 to SEQ ID NO: 383, can code for the amino acid sequence of the invention. Those alternative nucleic acid sequences which code for the same amino acid sequences encoded by the sequences of SEQ ID NO:379 to SEQ ID NO: 383 are also an aspect of the of the present invention.

[1211] The first variant (SEQ ID NO: 379, termed “Var I” in the figures) lacks exon 9b (FIG. 3), creating a unique sequence (bridge) between exons 9 and 10.

[1212] The second variant (SEQ ID NO: 380, termed “Var III” in the figures) is identical to SEQ ID NO: 379 except that it skips exon 8, and ends with exon 9, creating a unique sequence (bridge) between exons 7 and 9.

[1213] The third variant (SEQ ID NO: 381, termed “Var VII” in the figures) Starts from exon 2a, skips exon 3 and exon 9b, as described in FIG. 3, creating a unique sequence (bridge) between exon 2 and 4 and another unique sequence (bridge) between 9(a) and 10.

[1214] The fourth variant (SEQ ID NO: 382, termed “Var VIII” in the figures) Starts at exon 2a, skips exon 5 and terminates at exon 9, without exons 9b, 10 and 11, creating a unique sequence (bridge) between exons 4 and 6.

[1215] The fifth variant (SEQ ID NO: 383, termed “Var IX” in the figures) is identical to SEQ ID NO: 382, but without exon 3, creating a unique sequence (bridge) between exons 2 and 4, and another unique sequence (bridge) between exons 4 and 6.

[1216] It should be noted that the amino acid sequences of the above variants (for which nucleic acid sequences are shown in SEQ ID Nos: 379-383) are preferably described as “consisting essentially of” the numbered sequences; for example, the fifth variant preferably is of a nucleic acid sequence having a sequence consisting essentially of the sequence shown in SEQ ID NO:383.

[1217] SEQ IDs NO: 389-393 are the amino acid sequences encoded by SEQ IDs NO: 379-383, respectively.

[1218] “Primers and Amplicons According to the Present Invention”

SEQ ID NOs: 399-426 are Primers Used for PCR Amplifications:

[1219] a. hCHL2:
[1220] SEQ ID NO: 399 is referred to in the description below as p1.
[1221] SEQ ID NO: 400 is referred to in the description below as p2.
[1222] SEQ ID NO: 401 is referred to in the description below as p3.
[1223] SEQ ID NO: 402 is referred to in the description below as p4.
[1224] SEQ ID NO: 403 is referred to in the description below as p5.
[1225] SEQ ID NO: 404 is referred to in the description below as p6.
[1226] SEQ ID NO: 405 is referred to in the description below as p7.
[1227] SEQ ID NO: 406 is referred to in the description below as p8.
[1228] SEQ ID NO: 407 is referred to in the description below as p9.
[1229] b. mCHL2:
[1230] SEQ ID NO: 408 is referred to in the description below as p1.
[1231] SEQ ID NO: 409 is referred to in the description below as p2.
[1232] SEQ ID NO: 410 is referred to in the description below as p3.
[1233] SEQ ID NO: 411 is referred to in the description below as p4.
[1234] SEQ ID NO: 412 is referred to in the description below as p5.
[1235] SEQ ID NO: 413 is referred to in the description below as p6.
[1236] c. Human Osteocalcin: SEQ ID NOs: 414 and 415.
[1237] d. Mouse Osteocalcin: SEQ ID NOs: 416 and 417.
[1238] e. Mouse Myogenin: SEQ ID NOs: 418 and 419.
[1239] f. ATP synthase 6: SEQ ID NOs: 420 and 421.
[1240] g. 26SPSP: SEQ ID NOs: 422 and 423.
[1241] h. Mouse GAPDH: SEQ ID NOs: 424 and 425.
[1242] SEQ ID NO 426: mouse CHL2 nucleotide sequence
[1243] SEQ ID NO 427: mouse CHL2 protein sequence
[1244] SEQ ID NO 428: HPRT1-Forward primer
[1245] SEQ ID NO 429: HPRT1-Reverse primer
[1246] SEQ ID NO 430: HPRT1 amplicon
[1247] SEQ ID NO 431: PBGD-Forward primer
[1248] SEQ ID NO 432: PBGD-Reverse primer
[1249] SEQ ID NO 433: PBGD amplicon
[1250] SEQ ID NO 434: SDHA-Forward primer
[1251] SEQ ID NO 435: SDHA-Reverse primer
[1252] SEQ ID NO 436: SDHA amplicon
[1253] SEQ ID NO 437: G6PD-Forward primer
[1254] SEQ ID NO 438: G6PD-Reverse primer
[1255] SEQ ID NO 439: G6PD amplicon
[1256] SEQ ID NO 440: Exon 2a-Forward primer
[1257] SEQ ID NO 441: Exon 2a-Reverse primer
[1258] SEQ ID NO 442: amplicon exon 2a
[1259] SEQ ID NO 443: Ubiquitin-Forward primer
[1260] SEQ ID NO 444: Ubiquitin-Reverse primer
[1261] SEQ ID NO 445: Ubiquitin Amplicon
[1262] SEQ ID NO 446: Exon 4a Forward primer
[1263] SEQ ID NO 447: Exon 4a-Reverse primer
[1264] SEQ ID NO 448: Exon 4a-amplicon
[1265] SEQ ID NO 449: RPL-19-Forward primer
[1266] SEQ ID NO 450: RPL-19-Reverse primer
[1267] SEQ ID NO 451: RPL-19 amplicon

[1268] “CLH2 (Chordin Like Homolog) Sequences”:

[1269] All of the sequences described in this section refer to Group II CLH2 sequences.

[1270] SEQ ID NO: 384 (described in the figures as “Var II”) Has an accession number of AX140199. Var II contains an additional exon between exons 9 and 10, referred as “9b” in FIG. 3, creating a unique amino acid sequence.

[1271] SEQ ID NO: 394 is the amino acid sequence encoded by SEQ ID NO: 384.

[1272] SEQ ID NO: 385 (described in the figures as “Var IV”) Has an accession number of AX140202. Var IV starts from a unique exon 2a, as is demonstrated in FIG. 3, and contains an additional exon between exons 9 and 10, referred as “9b” in FIG. 3, creating a unique amino acid sequence. SEQ ID NO: 395 is the amino acid sequence encoded by SEQ ID NO: 385.

[1273] SEQ ID NO: 386 (described in the figures as “Var V”) Has an accession number of AX140203. Var V is identical to Var IV, while it skips exon 8, creating a unique sequence (bridge) between exons 7 and 9. SEQ ID NO: 396 is the amino acid sequence encoded by SEQ ID NO: 386.

[1274] SEQ ID NO: 387 (described in the figures as “Var VI”) Has an accession number of AX140204. Var VI starts from a unique exon 2a, as is demonstrated in FIG. 3, it skips exon 8, creating a unique sequence (bridge) between exons 7 and 9, and it does not contain exon 9b, creating a unique sequence (bridge) between exons 9 and 10.

[1275] SEQ ID NO: 397 is the amino acid sequence encoded by SEQ ID NO: 387.

[1276] SEQ ID NO: 388 (described in the figures as “Var X”) Has an accession number of AX140201. Var X starts from a unique exon 4a, as is demonstrated in FIG. 3. SEQ ID NO: 398 is the amino acid sequence encoded by SEQ ID NO: 388.

[1277] SEQ ID NOS 452-462 are amino acid sequences corresponding to the nucleic acid sequences shown in SEQ ID NOS 452-462, and so form Group II CLH nucleotide fragments. SEQ ID NOS 463-473 form amino acid sequences corresponding to Group II CLH polypeptides.

[1278] SEQ ID NO 474: mouse CHL2, corresponding to genbank accession number: AAH19399.

[1279] Thus, Group I sequences include amino acid sequences having at least about 70%, optionally at least about 80%, preferably at least about 85%, more preferably at least about 90% and most preferably at least about 95% homology to any of SEQ ID NOs 389-393; and nucleic acid sequences having at least about 70%, optionally at least about 80%, preferably at least about 85%, more preferably at least about 90% and most preferably at least about 95% homology to any of SEQ ID NOs 379-383.

[1280] Group II sequences include amino acid sequences having at least about 70%, optionally at least about 80%, preferably at least about 85%, more preferably at least about 90% and most preferably at least about 95% homology to any of SEQ ID NOs 394-398 or 463-473; and nucleic acid sequences having at least about 70%, optionally at least about 80%, preferably at least about 85%, more preferably at least about 90% and most preferably at least about 95% homology to any of SEQ ID NOs 384-388 or 452-462.

[1281] In addition, it should be noted that Group I sequences also have unique bridges. These bridges were noted above for the nucleotide sequences in terms of the exons. They are described below in terms of the amino acid sequences, although it should be noted that optionally a nucleotide sequence could be constructed according to any of the amino acid sequences below and used for any purpose ascribed to a nucleotide sequence as described herein. All the alignments were done against Var II, such that the bridges are described with regard to the amino acid sequence of Var II (SEQ ID NO: 394). The bridge is marked on a portion of the actual sequence below by //, which indicates that a portion of the sequence for that SEQ ID NO (relative to the sequence of Var II) is not present.

(SEQ ID NO 389)

Variant I bridge:
RFALEHEASDLVEIYL WKLVK // GIFHLTQIKKV
RKQDFQKEAQHFRLLA

[1282] This bridge is present between amino acid positions 373 (lys) and 374 (gly), and preferably comprises a peptide having a sequence taken from either side of these positions. For example, the peptide could optionally comprise a bridge portion of SEQ ID NO: 389, comprising a peptide having a length “n”, wherein n is at least about 10 amino acids in length, optionally at least about 20 amino acids in length, preferably at least about 30 amino acids in length, more preferably at least about 40 amino acids in length and most preferably at least about 50 amino acids in length, wherein at least two amino acids comprise KG, having a structure as follows (numbering according to SEQ ID NO:389): a sequence starting from any of amino acid number 373−x to 373; and ending at any of amino acid numbers 374+((n−2)−x), in which x varies from 0 to n−2.

[1283] For example, for peptides of 10 amino acids (such that n=10), the starting position could be as “early” in the sequence as amino acid number 365 if x=n−2=8 (ie 365=373-8), such that the peptide would end at amino acid number 374 (374+(8−8=0)). On the other hand, the peptide could start at amino acid number 373 if x=0 (ie 373=373-0), and could end at amino acid 382 (374+(8−0=8)).

[1284] The bridge portion above may comprise a peptide being at least 70%, optionally at least about 80%, preferably at least about 85%, more preferably at least about 90% and most preferably at least about 95% homologous to at least one sequence described above.

[1285] Similarly, the bridge portion may optionally be relatively short, such as from about 4 to about 9 amino acids in length. For four amino acids, the first bridge portion would comprise the following peptides: VKGI, KGIF, or LVKG. All peptides feature KG as a portion thereof. Peptides of from about five to about nine amino acids could optionally be similarly constructed.

(SEQ ID NO 390)

Variant III bridge:
PRHFRPKGAGSTFFVKIVLKEKHKK//EDKADPGHSEISSTRCPKAPGRV
LVHTSVSPSPDNLRRFALEHEA

[1286] This bridge is present between amino acid positions 250 (lys) and 251 (glu), and preferably comprises a peptide having a sequence taken from either side of these positions. For example, the peptide could optionally comprise a bridge portion of SEQ ID NO: 390, comprising a peptide having a length “n”, wherein n is at least about 10 amino acids in length, optionally at least about 20 amino acids in length, preferably at least about 30 amino acids in length, more preferably at least about 40 amino acids in length and most preferably at least about 50 amino acids in length, wherein at least two amino acids comprise KE, having a structure as follows (numbering according to SEQ ID NO:390): a sequence starting from any of amino acid number 250−x to 250; and ending at any of amino acid numbers 251+((n−2)−x), in which x varies from 0 to n−2.

[1287] The bridge portion above may comprise a peptide being at least 70%, optionally at least about 80%, preferably at least about 85%, more preferably at least about 90% and most preferably at least about 95% homologous to at least one sequence described above.

[1288] Similarly, the bridge portion may optionally be relatively short, such as from about 4 to about 9 amino acids in length. For four amino acids, the first bridge portion would comprise the following peptides: KKED, HKKE, or KEDK. All peptides feature KE as a portion thereof. Peptides of from about five to about nine amino acids could optionally be similarly constructed.

(SEQ ID NO 391)

Variant VII bridge:
PDMIFCLFHGKRYSPGESWIIPYLEPQGLMYCLRCTCSE //
NLTLPLDSGPHQSPASTTGPCLFHGKRYSPGESWH

[1289] This bridge is present between amino acid positions 45 (glu) and 46 (asn), and preferably comprises a peptide having a sequence taken from either side of these positions. For example, the peptide could optionally comprise a bridge portion of SEQ ID NO: 391, comprising a peptide having a length “n”, wherein n is at least about 10 amino acids in length, optionally at least about 20 amino acids in length, preferably at least about 30 amino acids in length, more preferably at least about 40 amino acids in length and most preferably at least about 50 amino acids in length, wherein at least two amino acids comprise EN, having a structure as follows (numbering according to SEQ ID NO:391): a sequence starting from any of amino acid number 45-x to 45; and ending at any of amino acid numbers 46+((n−2)−x), in which x varies from 0 to n-2; wherein if the peptide is 50 amino acids in length, the starting position cannot be any smaller than 1.

[1290] The bridge portion above may comprise a peptide being at least 70%, optionally at least about 80%, preferably at least about 85%, more preferably at least about 90% and most preferably at least about 95% homologous to at least one sequence described above.

[1291] Similarly, the bridge portion may optionally be relatively short, such as from about 4 to about 9 amino acids in length. For four amino acids, the first bridge portion would comprise the following peptides: SENL, ENLT, or CSEN. All peptides feature EN as a portion thereof. Peptides of from about five to about nine amino acids could optionally be similarly constructed.

[1292] This variant also has a new N-terminal sequence, which may optionally be constructed as part of a bridge as described above: MALVGLPG.

(SEQ ID NO 392)

Variant VIII bridge:
TPSGLRAPPKSCQHNGTMYQHGEIFSAHELFPSRLPNQCVLCSCT //
MRQVSNRMKRTVCSRSMG

[1293] This bridge is present between amino acid positions 124 (thr) and 125 (met), and preferably comprises a peptide having a sequence taken from either side of these positions. For example, the peptide could optionally comprise a bridge portion of SEQ ID NO: 392, comprising a peptide having a length “n”, wherein n is at least about 10 amino acids in length, optionally at least about 20 amino acids in length, preferably at least about 30 amino acids in length, more preferably at least about 40 amino acids in length and most preferably at least about 50 amino acids in length, wherein at least two amino acids comprise TM, having a structure as follows (numbering according to SEQ ID NO:392): a sequence starting from any of amino acid number 124−x to 124 and ending at any of amino acid numbers 125+((n−2)−x), in which x varies from 0 to n−2, wherein the ending position is not greater than 142.

[1294] The bridge portion above may comprise a peptide being at least 70%, optionally at least about 80%, preferably at least about 85%, more preferably at least about 90% and most preferably at least about 95% homologous to at least one sequence described above.

[1295] Similarly, the bridge portion may optionally be relatively short, such as from about 4 to about 9 amino acids in length. For four amino acids, the first bridge portion would comprise the following peptides: CTMR, SCTM, or TMRQ. All peptides feature TM as a portion thereof. Peptides of from about five to about nine amino acids could optionally be similarly constructed.

[1296] This variant also has a new N-terminal sequence, which may optionally be constructed as part of a bridge as described above:

MALVGLPG

(SEQ ID NO 393)

Variant IX bridge:
PDMFCLFHGKRYSPGESWHPYLEPQGLMYCLRCTCSE // NLTLPLDSG
PHQSPASTTGPCLFHGKRYSPGESWHPYLEPQGLMYCLRCTCS

[1297] This bridge is present between amino acid positions 45 (glu) and 46 (asn), and preferably comprises a peptide having a sequence taken from either side of these positions. For example, the peptide could optionally comprise a bridge portion of SEQ ID NO: 393, comprising a peptide having a length “n”, wherein n is at least about 10 amino acids in length, optionally at least about 20 amino acids in length, preferably at least about 30 amino acids in length, more preferably at least about 40 amino acids in length and most preferably at least about 50 amino acids in length, wherein at least two amino acids comprise EN, having a structure as follows (numbering according to SEQ ID NO:393): a sequence starting from any of amino acid number 45-x to 45; and ending at any of amino acid numbers 46+((n−2)−x), in which x varies from 0 to n−2; wherein if the peptide is 50 amino acids in length, the starting position cannot be any smaller than 1.

[1298] The bridge portion above may comprise a peptide being at least 70%, optionally at least about 80%, preferably at least about 85%, more preferably at least about 90% and most preferably at least about 95% homologous to at least one sequence described above.

[1299] Similarly, the bridge portion may optionally be relatively short, such as from about 4 to about 9 amino acids in length. For four amino acids, the first bridge portion would comprise the following peptides: SENL, ENLT, or CSEN. All peptides feature EN as a portion thereof. Peptides of from about five to about nine amino acids could optionally be similarly constructed.

[1300] This variant also has a new N-terminal sequence, which may optionally be constructed as part of a bridge as described above:
[1301] MALVGLPG

[1302] “Unique sequence”—as a result of alternative splicing, a non terminal exon is skipped (see for example variant 1 (exon 9b skipped), 2 (exons 9b and 3 are skipped), etc. Skipping of a non-terminal exon creates a unique sequence not present in the parent CHL2 which is the result of a ligation of the two exons flanking the “skipped” exon. This unique sequence results from the unique skipping pattern of the specific variant distinguishing the variant CHL2 of the invention from the parent chordin, or other known variants of chordin. Another possible unique sequence is intron-included sequences marked as exon 2a (variants IV, V, VI, VII, VIII) or exon 4a (variant X). Specific positions of the unique sequences are specified herein.

[1303] In order to understand the invention and to see how it may be carried out in practice, a preferred embodiment will now be described, by way of non-limiting example only, with reference to the accompanying drawings, described hereinbelow.

[1304] FIG. 1 shows a comparison of the human and mouse CHL2 variant I and CHL proteins. Amino acid sequence alignment of the orthologous and paralogous proteins indicates high conservation between these two vertebrate genes. The position of the signal peptide (SP) and the three CR repeats (CR1-CR3) is indicated. Sequences were aligned using the ClustalW program. Identical and similar residues are indicated by dark and light shading, respectively. Dashes indicate gaps introduced to align sequences. Protein sequences taken for the analysis were: hCHL2 (SEQ ID NO:11), mCHL2 (SEQ ID NO:96), hCHL (amino acid sequence corresponding to nucleotide sequence given in Genbank accession number AX175130), and mCHL (genebank accession number BC066832).

[1305] FIG. 2 shows a schematic representation of the human and mouse CHL2 and CHL genes (sequence identification numbers as for FIG. 1). Shown is the intron-exon genomic organization of the genes. Exons are depicted as boxes, and their size is given in bp. Introns, not drawn to scale, are drawn as thin lines. Coding and untranslated sequences are shown in gray and white, respectively. Sequences encoding for the signal peptide and the CR repeats are indicated on top. Note that CR1 and CR2 are each encoded by two exons, while CR3 is encoded by a single exon.

[1306] FIG. 3 shows alternative splicing of the hCHL2 gene. The exon-intron organization and the primers employed in the RT-PCR analysis are indicated on the top diagram, which shows the entire gene. The various splice variants identified are shown. UTRs are depicted in white, and the ORFs of the splice variants encoding different isoforms are indicated in gray or varying patterns. The size of the protein isoforms is given in amino acids, and the existence of a signal peptide (SP) and the CR repeats is indicated for each isoform.

[1307] Primers p1 (SEQ ID NO:399)+p4 (SEQ ID NO: 402) were used to detect variants I, II, III; primers p1 (SEQ ID NO:399)+p8 (SEQ ID NO: 406) were used to detect variants I, II; primers p2 (SEQ ID NO: 400)+p4 (SEQ ID NO: 402) were used to detect variants IV, V, VI, VII, VIII, IX; primers p3 (SEQ ID NO: 401)+p4 (SEQ ID NO: 402) were used to detect variant X; primers p2 (SEQ ID NO: 400)+p7 (SEQ ID NO: 405) were used to detect variants IV, VIII; primers p5 (SEQ ID NO: 403)+p7 (SEQ ID NO: 405) were used to detect variants containing exon 8; primers p1 (SEQ ID NO:399)+p6 (SEQ ID NO: 404) were used to detect variant III) in adult human tissues (results not shown).

[1308] The following describes the exons that characterize variants according to the present invention and primers that may optionally used to amplify each exon: exon 1 (p1 (SEQ ID NO:399)+p4 (SEQ ID NO: 402)) characterizes variants I, II and III; exon 2a (p2 (SEQ ID NO: 400)+p4 (SEQ ID NO: 402)) characterizes variants IV, V, VI, VII, VIII, IX; exon 4a (p3 (SEQ ID NO: 401)+p7 (SEQ ID NO: 405)) characterizes variant X; exon 8 (p5 (SEQ ID NO: 403)+p7 (SEQ ID NO: 405)) characterizes variants I, II, IV, VII, VIII, IX, X) Splice variants.

[1309] Relative expression of hCHL2 transcripts containing the amplicon of the unique exon 2a, SEQ ID NO: 442 (e.g., variant no. IV, V, VI, VII, VIII, IX), in normal and cancerous breast tissues was determined by real time PCR using primers for SEQ ID NO: 442 (SEQ ID NO: 440, 441). Expression was normalized to the averaged expression of four housekeeping genes PBGD (GenBank Accession No. BC019323; amplicon—SEQ ID NO: 433, primers SEQ ID Nos: 431, 432), HPRT1 (GenBank Accession No. NM_{—}000194; amplicon—SEQ ID NO: 430, primers SEQ ID Nos: 428, 429), G-6_PD (GenBank Accession No. NM_{—}000402; amplicon—SEQ ID NO: 439, primers SEQ ID Nos: 437, 438) and SDHA (GenBank Accession No. NM_{—}004168; amplicon—SEQ ID NO: 436, primers SEQ ID Nos: 434, 435); results not shown. However, the primers were able to successfully amplify the desired amplicon.

[1310] Relative expression of hCHL2 transcripts containing the amplicon of the unique exon 4a, SEQ ID NO: 448, (e.g., variant no. X) in normal, benign and cancerous prostate tissues was determined by real time PCR using primers for SEQ ID NO: 448 (SEQ ID NO: 446, 447). Expression was normalized to the averaged expression of four housekeeping genes; results not shown. However, the primers were able to successfully amplify the desired amplicon.

[1311] It is appreciated that certain features of the invention, which are, for clarity, described in the context of separate embodiments, may also be provided in combination in a single embodiment. Conversely, various features of the invention, which are, for brevity, described in the context of a single embodiment, may also be provided separately or in any suitable subcombination.

[1312] Although the invention has been described in conjunction with specific embodiments thereof, it is evident that many alternatives, modifications and variations will be apparent to those skilled in the art. Accordingly, it is intended to embrace all such alternatives, modifications and variations that fall within the spirit and broad scope of the appended claims. All publications, patents and patent applications mentioned in this specification are herein incorporated in their entirety by reference into the specification, to the same extent as if each individual publication, patent or patent application was specifically and individually indicated to be incorporated herein by reference. In addition, citation or identification of any reference in this application shall not be construed as an admission that such reference is available as prior art to the present invention.

The application's sequence listing, which the Patent Office published only in electronic form, follows.

SEQUENCE LISTING (506 sequences)

SEQ ID NO: 1 - DNA, 1404 bp, Homo sapiens
taaccctcttagttcacatctgtggtcagtctgggcttaatggcaccccatcctccccatttgctcatttggtctcagcagtgaatggaaaaagtgtctcgtcctgaccccctgcttccctttcctacttcctggaaatccacaggatgctgcatttgctcagcagatttaacagcccacttatcactcatggaagatccctcctcctgcttgactccgccctctctccctctgcccgctttcaataagaggcagagacagcagccagaggaaccgagaggctgagactaacccagaaacatccaattctcaaactgaagctcgcactctcgcctccagcatgaaagtctctgccgcccttctgtgcctgctgctcatagcagccaccttcattccccaagggctcgctcagccagatgcaatcaatgccccagtcacctgctgttataacttcaccaataggaagatctcagtgcagaggctcgcgagctatagaagaatcaccagcagcaagtgtcccaaagaagctgtgatgtgagttcagcacaccaaccttccctggcctgaagttcttccttgtggagcaagggacaagcctcataaacctagagtcagagagtgcactatttaacttaatgtacaaaggttcccaatgggaaaactgaggcaccaagggaaaaagtgaaccccaacatcactctccacctgggtgcctattcagaacaccccaatttctttagcttgaagtcaggatggctccacctggacacctataggagcagtttgccctgggttccctccttccacctgcgttcctcctctagctcccatggcagccctttggtgcagaatgggctgcacttctagaccaaaactgcaaaggaacttcatctaactctgtcctccctccccacagcttcaagaccattgtggccaaggagatctgtgctgaccccaagcagaagtgggttcaggattccatggaccacctggacaagcaaacccaaactccgaagacttgaacactcactccacaacccaagaatctgcagctaacttattttcccctagctttccccagacaccctgttttattttattataatgaattttgtttgttgatgtgaaacattatgccttaagtaatgttaattcttatttaagttattgatgttttaagtttatctttcatggtactagtgttttttagatacagagacttggggaaattgcttttcctcttgaaccacagttctacccctgggatgttttgagggtctttgcaagaatcattaatacaaagaattttttttaacattccaatgcattgctaaaatattattgtggaaatgaatattttgtaactattacaccaaataaatatatttttgtacaaaacctgac

SEQ ID NO: 2 - DNA, 387 bp, Artificial
  Synthetic oligonucleotide
taaccctcttagttcacatctgtggtcagtctgggcttaatggcaccccatcctccccatttgctcatttggtctcagcagtgaatggaaaaagtgtctcgtcctgaccccctgcttccctttcctacttcctggaaatccacaggatgctgcatttgctcagcagatttaacagcccacttatcactcatggaagatccctcctcctgcttgactccgccctctctccctctgcccgctttcaataagaggcagagacagcagccagaggaaccgagaggctgagactaacccagaaacatccaattctcaaactgaagctcgcactctcgcctccagcatgaaagtctctgccgcccttctgtgcctgctgctcatagcagccac

SEQ ID NO: 3 - DNA, 382 bp, Artificial
  Synthetic oligonucleotide
gtgagttcagcacaccaaccttccctggcctgaagttcttccttgtggagcaagggacaagcctcataaacctagagtcagagagtgcactatttaacttaatgtacaaaggttcccaatgggaaaactgaggcaccaagggaaaaagtgaaccccaacatcactctccacctgggtgcctattcagaacaccccaatttctttagcttgaagtcaggatggctccacctggacacctataggagcagtttgccctgggttccctccttccacctgcgttcctcctctagctcccatggcagccctttggtgcagaatgggctgcacttctagaccaaaactgcaaaggaacttcatctaactctgtcctccctccccacag

SEQ ID NO: 4 - DNA, 356 bp, Artificial
  Synthetic oligonucleotide
cttcaagaccattgtggccaaggagatctgtgctgaccccaagcagaagtgggttcaggattccatggaccacctggacaagcaaacccaaactccgaagacttgaacactcactccacaacccaagaatctgcagctaacttattttcccctagctttccccagacaccctgttttattttattataatgaattttgtttgttgatgtgaaacattatgccttaagtaatgttaattcttatttaagttattgatgttttaagtttatctttcatggtactagtgttttttagatacagagacttggggaaattgcttttcctcttgaaccacagttctacccctgggatgtttt

SEQ ID NO: 5 - DNA, 132 bp, Artificial
  Synthetic oligonucleotide
gagggtctttgcaagaatcattaatacaaagaattttttttaacattccaatgcattgctaaaatattattgtggaaatgaatattttgtaactattacaccaaataaatatatttttgtacaaaacctgac

SEQ ID NO: 6 - DNA, 29 bp, Artificial
  Synthetic oligonucleotide
cttcattccccaagggctcgctcagccag

SEQ ID NO: 7 - DNA, 118 bp, Artificial
  Synthetic oligonucleotide
atgcaatcaatgccccagtcacctgctgttataacttcaccaataggaagatctcagtgcagaggctcgcgagctatagaagaatcaccagcagcaagtgtcccaaagaagctgtgat

SEQ ID NO: 8 - protein, 99 aa, Homo sapiens
MKVSAALLCLLLIAATFIPQGLAQPDAINAPVTCCYNFTNRKISVQRLASYRRITSSKCPKEAVIFKTIVAKEICADPKQKWVQDSMDHLDKQTQTPKT

SEQ ID NO: 9 - protein, 65 aa, Homo sapiens
MKVSAALLCLLLIAATFIPQGLAQPDAINAPVTCCYNFTNRKISVQRLASYRRITSSKCPKEAVM

SEQ ID NO: 10 - DNA, 4016 bp, Homo sapiens
gtgttcagctgttcttggctgacttcacatcaaaactcctatactgacctgagacagaggcagcagtgatacccacctgagagatcctgtgtttgaacaactgcttcccaaaacggaaagtatttcaagcctaaacctttgggtgaaaagaactcttgaagtcatgattgcttcacagtttctctcagctctcactttggtgcttctcattaaagagagtggagcctggtcttacaacacctccacggaagctatgacttatgatgaggccagtgcttattgtcagcaaaggtacacacacctggttgcaattcaaaacaaagaagagattgagtacctaaactccatattgagctattcaccaagttattactggattggaatcagaaaagtcaacaatgtgtgggtctgggtaggaacccagaaacctctgacagaagaagccaagaactgggctccaggtgaacccaacaataggcaaaaagatgaggactgcgtggagatctacatcaagagagaaaaagatgtgggcatgtggaatgatgagaggtgcagcaagaagaagcttgccctatgctacacagctgcctgtaccaatacatcctgcagtggccacggtgaatgtgtagagaccatcaataattacacttgcaagtgtgaccctggcttcagtggactcaagtgtgagcaaattgtgaactgtacagccctggaatcccctgagcatggaagcctggtttgcagtcacccactgggaaacttcagctacaattcttcctgctctatcagctgtgataggggttacctgccaagcagcatggagaccatgcagtgtatgtcctctggagaatggagtgctcctattccagcctgcaatgtggttgagtgtgatgctgtgacaaatccagccaatgggttcgtggaatgtttccaaaaccctggaagcttcccatggaacacaacctgtacatttgactgtgaagaaggatttgaactaatgggagcccagagccttcagtgtacctcatctgggaattgggacaacgagaagccaacgtgtaaagctgtgacatgcagggccgtccgccagcctcagaatggctctgtgaggtgcagccattcccctgctggagagttcaccttcaaatcatcctgcaacttcacctgtgaggaaggcttcatgttgcagggaccagcccaggttgaatgcaccactcaagggcagtggacacagcaaatcccagtttgtgaagctttccagtgcacagccttgtccaaccccgagcgaggctacatgaattgtcttcctagtgcttctggcagtttccgttatgggtccagctgtgagttctcctgtgagcagggttttgtgttgaagggatccaaaaggctccaatgtggccccacaggggagtgggacaacgagaagcccacatgtgaaggtacagtctttgtttttattttattttaagataaaaagaactattgaagagcttgggaacttggttaccttgggaaacgtattgctggagatgcaaacaaacttctaaagtgctctctcgtgtgttccagctgtgagatgcgatgctgtccaccagcccccgaagggtttggtgaggtgtgctcattcccctattggagaattcacctacaagtcctcttgtgccttcagctgtgaggagggatttgaattatatggatcaactcaacttgagtgcacatctcagggacaatggacagaagaggttccttcctgccaagtggtaaaatgttcaagcctggcagttccgggaaagatcaacatgagctgcagtggggagcccgtgtttggcactgtgtgcaagttcgcctgtcctgaaggatggacgctcaatggctctgcagctcggacatgtggagccacaggacactggtctggcctgctacctacctgtgaagctcccactgagtccaacattcccttggtagctggactttctgctgctggactctccctcctgacattagcaccatttctcctctggcttcggaaatgcttacggaaagcaaagaaatttgttcctgccagcagctgccaaagccttgaatcagatggaagctaccaaaagccttcttacatcctttaagttcaaaagaatcagaaacaggtgcatctggggaactagagggatacactgaagttaacagagacagataactctcctcgggtctctggcccttcttgcctactatgccagatgcctttatggctgaaaccgcaacacccatcaccacttcaatagatcaaagtccagcaggcaaggacggccttcaactgaaaagactcagtgttccctttcctactctcaggatcaagaaagtgttggctaatgaagggaaaggatattttcttccaagcaaaggtgaagagaccaagactctgaaatctcagaattccttttctaactctcccttgctcgctgtaaaatcttggcacagaaacacaatattttgtggctttctttcttttgcccttcacagtgtttcgacagctgattacacagttgctgtcataagaatgaataataattatccagagtttagaggaaaaaaatgactaaaaatattataacttaaaaaaatgacagatgttgaatgcccacaggcaaatgcatggagggttgttaatggtgcaaatcctactgaatgctctgtgcgagggttactatgcacaatttaatcactttcatccctatgggattcagtgcttcttaaagagttcttaaggattgtgatatttttacttgcattgaatatattataatcttccatacttcttcattcaatacaagtgtggtagggacttaaaaaacttgtaaatgctgtcaactatgatatggtaaaagttacttattctagattaccccctcattgtttattaacaaattatgttacatctgttttaaatttatttcaaaaagggaaactattgtcccctagcaaggcatgatgttaaccagaataaagttctgagtgtttttactacagttgttttttgaaaacatggtagaattggagagtaaaaactgaatggaaggtttgtatattgtcagatattttttcagaaatatgtggtttccacgatgaaaaacttccatgaggccaaacgttttgaactaataaaagcataaatgcaaacacacaaaggtataattttatgaatgtctttgttggaaaagaatacagaaagatggatgtgctttgcattcctacaaagatgtttgtcagatatgatatgtaaacataattcttgtatattatggaagattttaaattcacaatagaaactcaccatgtaaaagagtcatctggtagatttttaacgaatgaagatgtctaatagttattccctatttgttttcttctgtatgttagggtgctctggaagagaggaatgcctgtgtgagcaagcatttatgtttatttataagcagatttaacaattccaaaggaatctccagttttcagttgatcactggcaatgaaaaattctcagtcagtaattgccaaagctgctctagccttgaggagtgtgagaatcaaaactctcctacacttccattaacttagcatgtgttgaaaaaaaagtttcagagaagttctggctgaacactggcaacaacaaagccaacagtcaaaacagagatgtgataaggatcagaacagcagaggttcttttaaaggggcagaaaaactctgggaaataagagagaacaactactgtgatcaggctatgtatggaatacagtgttattttctttgaaattgtttaagtgttgtaaatatttatgtaaactgcattagaaattagctgtgtgaaataccagtgtggtttgtgtttgagttttattgagaattttaaattataacttaaaatattttataatttttaaagtatatatttatttaagcttatgtcagacctatttgacataacactataaaggttgacaataaatgtgcttatgtttatctct

SEQ ID NO: 11 - DNA, 1150 bp, Homo sapiens
gtgttcagctgttcttggctgacttcacatcaaaactcctatactgacctgagacagaggcagcagtgatacccacctgagagatcctgtgtttgaacaactgcttcccaaaacggaaagtatttcaagcctaaacctttgggtgaaaagaactcttgaagtcatgattgcttcacagtttctctcagctctcactttggtgcttctcattaaagagagtggagcctggtcttacaacacctccacggaagctatgacttatgatgaggccagtgcttattgtcagcaaaggtacacacacctggttgcaattcaaaacaaagaagagattgagtacctaaactccatattgagctattcaccaagttattactggattggaatcagaaaagtcaacaatgtgtgggtctgggtaggaacccagaaacctctgacagaagaagccaagaactgggctccaggtgaacccaacaataggcaaaaagatgaggactgcgtggagatctacatcaagagagaaaaagatgtgggcatgtggaatgatgagaggtgcagcaagaagaagcttgccctatgctacacagctgcctgtaccaatacatcctgcagtggccacggtgaatgtgtagagaccatcaataattacacttgcaagtgtgaccctggcttcagtggactcaagtgtgagcaaattgtgaactgtacagccctggaatcccctgagcatggaagcctggtttgcagtcacccactgggaaacttcagctacaattcttcctgctctatcagctgtgataggggttacctgccaagcagcatggagaccatgcagtgtatgtcctctggagaatggagtgctcctattccagcctgcaatggtaaatccctctgagaatgcacagaacgttctgtaactcatccctcattgcttctgttttttgattcaacttacattttcaaaacttcagggaaagtttttttttgtttttgtttttaatacaatttgttctctcagccaatgtatattgccaacccagtacctgcttgggttgagagaggtttttttattctatgcttgaaatgggtgtttctgaggctctggtgatttgtaagggagaccataaaacaataaagctctagaaatctcaat

SEQ ID NO: 12 - DNA, 1061 bp, Homo sapiens
gtgttcagctgttcttggctgacttcacatcaaaactcctatactgacctgagacagaggcagcagtgatacccacctgagagatcctgtgtttgaacaactgcttcccaaaacggaaagtatttcaagcctaaacctttgggtgaaaagaactcttgaagtcatgattgcttcacagtttctctcagctctcactttggtgcttctcattaaagagagtggagcctggtcttacaacacctccacggaagctatgacttatgatgaggccagtgcttattgtcagcaaaggtacacacacctggttgcaattcaaaacaaagaagagattgagtacctaaactccatattgagctattcaccaagttattactggattggaatcagaaaagtcaacaatgtgtgggtctgggtaggaacccagaaacctctgacagaagaagccaagaactgggctccaggtgaacccaacaataggcaaaaagatgaggactgcgtggagatctacatcaagagagaaaaagatgtgggcatgtggaatgatgagaggtgcagcaagaagaagcttgccctatgctacacagctgcctgtaccaatacatcctgcagtggccacggtgaatgtgtagagaccatcaataattacacttgcaagtgtgaccctggcttcagtggactcaagtgtgagcaaagtaagtctggttcttgcctctttcttcacttgagatggtagcaccatctcacgtcctagctggcattagagtcaggtctgcatgccttcccttccctggtgcagatggtgtcatatggtgatcgtgagctgagactatgaagtcagaccctgctgggtttgagtcctagattcaccagttatttattttggcaccttgacaagatagtttaactctctatgtcagttttctcattgtaaaatgaggataataatagtgtgaacttcataggctcatggttacatggtgcctggcacacaggacacattcaataaactgtaattctgtgtccctgcgaggaacatgtactcacctcatctaggtggtaac

SEQ ID NO: 13 - DNA, 384 bp, Artificial
  Synthetic oligonucleotide
tgcttctcattaaagagagtggagcctggtcttacaacacctccacggaagctatgacttatgatgaggccagtgcttattgtcagcaaaggtacacacacctggttgcaattcaaaacaaagaagagattgagtacctaaactccatattgagctattcaccaagttattactggattggaatcagaaaagtcaacaatgtgtgggtctgggtaggaacccagaaacctctgacagaagaagccaagaactgggctccaggtgaacccaacaataggcaaaaagatgaggactgcgtggagatctacatcaagagagaaaaagatgtgggcatgtggaatgatgagaggtgcagcaagaagaagcttgccctatgctacacag

SEQ ID NO: 14 - DNA, 369 bp, Artificial
  Synthetic oligonucleotide
gtaagtctggttcttgcctctttcttcacttgagatggtagcaccatctcacgtcctagctggcattagagtcaggtctgcatgccttcccttccctggtgcagatggtgtcatatggtgatcgtgagctgagactatgaagtcagaccctgctgggtttgagtcctagattcaccagttatttattttggcaccttgacaagatagtttaactctctatgtcagttttctcattgtaaaatgaggataataatagtgtgaacttcataggctcatggttacatggtgcctggcacacaggacacattcaataaactgtaattctgtgtccctgcgaggaacatgtactcacctcatctaggtggtaac

SEQ ID NO: 15 - DNA, 186 bp, Artificial
  Synthetic oligonucleotide
ttgtgaactgtacagccctggaatcccctgagcatggaagcctggtttgcagtcacccactgggaaacttcagctacaattcttcctgctctatcagctgtgataggggttacctgccaagcagcatggagaccatgcagtgtatgtcctctggagaatggagtgctcctattccagcctgcaatg

SEQ ID NO: 16 - DNA, 272 bp, Artificial
  Synthetic oligonucleotide
gtaaatccctctgagaatgcacagaacgttctgtaactcatccctcattgcttctgttttttgattcaacttacattttcaaaacttcagggaaagtttttttttgtttttgtttttaatacaatttgttctctcagccaatgtatattgccaacccagtacctgcttgggttgagagaggtttttttattctatgcttgaaatgggtgtttctgaggctctggtgatttgtaagggagaccataaaacaataaagctctagaaatctcaat

SEQ ID NO: 17 - DNA, 186 bp, Artificial
  Synthetic oligonucleotide
tggttgagtgtgatgctgtgacaaatccagccaatgggttcgtggaatgtttccaaaaccctggaagcttcccatggaacacaacctgtacatttgactgtgaagaaggatttgaactaatgggagcccagagccttcagtgtacctcatctgggaattgggacaacgagaagccaacgtgtaaag

SEQ ID NO: 18 - DNA, 189 bp, Artificial
  Synthetic oligonucleotide
ctgtgacatgcagggccgtccgccagcctcagaatggctctgtgaggtgcagccattcccctgctggagagttcaccttcaaatcatcctgcaacttcacctgtgaggaaggcttcatgttgcagggaccagcccaggttgaatgcaccactcaagggcagtggacacagcaaatcccagtttgtgaag

SEQ ID NO: 19 - DNA, 189 bp, Artificial
  Synthetic oligonucleotide
ctttccagtgcacagccttgtccaaccccgagcgaggctacatgaattgtcttcctagtgcttctggcagtttccgttatgggtccagctgtgagttctcctgtgagcagggttttgtgttgaagggatccaaaaggctccaatgtggccccacaggggagtgggacaacgagaagcccacatgtgaag

SEQ ID NO: 20 - DNA, 130 bp, Artificial
  Synthetic oligonucleotide
gtacagtctttgtttttattttattttaagataaaaagaactattgaagagcttgggaacttggttaccttgggaaacgtattgctggagatgcaaacaaacttctaaagtgctctctcgtgtgttccag

SEQ ID NO: 21 - DNA, 189 bp, Artificial
  Synthetic oligonucleotide
ctgtgagatgcgatgctgtccaccagcccccgaagggtttggtgaggtgtgctcattcccctattggagaattcacctacaagtcctcttgtgccttcagctgtgaggagggatttgaattatatggatcaactcaacttgagtgcacatctcagggacaatggacagaagaggttccttcctgccaag

SEQ ID NO: 22 - DNA, 177 bp, Artificial
  Synthetic oligonucleotide
tggtaaaatgttcaagcctggcagttccgggaaagatcaacatgagctgcagtggggagcccgtgtttggcactgtgtgcaagttcgcctgtcctgaaggatggacgctcaatggctctgcagctcggacatgtggagccacaggacactggtctggcctgctacctacctgtgaag

SEQ ID NO: 23 - DNA, 1875 bp, Artificial
  Synthetic oligonucleotide
aaacaggtgcatctggggaactagagggatacactgaagttaacagagacagataactctcctcgggtctctggcccttcttgcctactatgccagatgcctttatggctgaaaccgcaacacccatcaccacttcaatagatcaaagtccagcaggcaaggacggccttcaactgaaaagactcagtgttccctttcctactctcaggatcaagaaagtgttggctaatgaagggaaaggatattttcttccaagcaaaggtgaagagaccaagactctgaaatctcagaattccttttctaactctcccttgctcgctgtaaaatcttggcacagaaacacaatattttgtggctttctttcttttgcccttcacagtgtttcgacagctgattacacagttgctgtcataagaatgaataataattatccagagtttagaggaaaaaaatgactaaaaatattataacttaaaaaaatgacagatgttgaatgcccacaggcaaatgcatggagggttgttaatggtgcaaatcctactgaatgctctgtgcgagggttactatgcacaatttaatcactttcatccctatgggattcagtgcttcttaaagagttcttaaggattgtgatatttttacttgcattgaatatattataatcttccatacttcttcattcaatacaagtgtggtagggacttaaaaaacttgtaaatgctgtcaactatgatatggtaaaagttacttattctagattaccccctcattgtttattaacaaattatgttacatctgttttaaatttatttcaaaaagggaaactattgtcccctagcaaggcatgatgttaaccagaataaagttctgagtgtttttactacagttgttttttgaaaacatggtagaattggagagtaaaaactgaatggaaggtttgtatattgtcagatattttttcagaaatatgtggtttccacgatgaaaaacttccatgaggccaaacgttttgaactaataaaagcataaatgcaaacacacaaaggtataattttatgaatgtctttgttggaaaagaatacagaaagatggatgtgctttgcattcctacaaagatgtttgtcagatatgatatgtaaacataattcttgtatattatggaagattttaaattcacaatagaaactcaccatgtaaaagagtcatctggtagatttttaacgaatgaagatgtctaatagttattccctatttgttttcttctgtatgttagggtgctctggaagagaggaatgcctgtgtgagcaagcatttatgtttatttataagcagatttaacaattccaaaggaatctccagttttcagttgatcactggcaatgaaaaattctcagtcagtaattgccaaagctgctctagccttgaggagtgtgagaatcaaaactctcctacacttccattaacttagcatgtgttgaaaaaaaagtttcagagaagttctggctgaacactggcaacaacaaagccaacagtcaaaacagagatgtgataaggatcagaacagcagaggttcttttaaaggggcagaaaaactctgggaaataagagagaacaactactgtgatcaggctatgtatggaatacagtgttattttctttgaaattgtttaagtgttgtaaatatttatgtaaactgcattagaaattagctgtgtgaaataccagtgtggtttgtgtttgagttttattgagaattttaaattataacttaaaatattttataatttttaaagtatatatttatttaagcttatgtcagacctatttgacataacactataaaggttgacaataaatgtgcttatgtttatctct

SEQ ID NO: 24 - DNA, 115 bp, Artificial
  Synthetic oligonucleotide
gtgttcagctgttcttggctgacttcacatcaaaactcctatactgacctgagacagaggcagcagtgatacccacctgagagatcctgtgtttgaacaactgcttcccaaaacg

SEQ ID NO: 25 - DNA, 85 bp, Artificial
  Synthetic oligonucleotide
gaaagtatttcaagcctaaacctttgggtgaaaagaactcttgaagtcatgattgcttcacagtttctctcagctctcactttgg

SEQ ID NO: 26 - DNA, 108 bp, Artificial
  Synthetic oligonucleotide
ctgcctgtaccaatacatcctgcagtggccacggtgaatgtgtagagaccatcaataattacacttgcaagtgtgaccctggcttcagtggactcaagtgtgagcaaa

SEQ ID NO: 27 - DNA, 108 bp, Artificial
  Synthetic oligonucleotide
ctcccactgagtccaacattcccttggtagctggactttctgctgctggactctccctcctgacattagcaccatttctcctctggcttcggaaatgcttacggaaag

SEQ ID NO: 28 - DNA, 22 bp, Artificial
  Synthetic oligonucleotide
caaagaaatttgttcctgccag

SEQ ID NO: 29 - DNA, 73 bp, Artificial
  Synthetic oligonucleotide
cagctgccaaagccttgaatcagatggaagctaccaaaagccttcttacatcctttaagttcaaaagaatcag

SEQ ID NO: 30 - protein, 610 aa, Homo sapiens
MIASQFLSALTLVLLIKESGAWSYNTSTEAMTYDEASAYCQQRYTHLVAIQNKEEIEYLNSILSYSPSYYWIGIRKVNNVWVWVGTQKPLTEEAKNWAPGEPNNRQKDEDCVEIYIKREKDVGMWNDERCSKKKLALCYTAACTNTSCSGHGECVETINNYTCKCDPGFSGLKCEQIVNCTALESPEHGSLVCSHPLGNFSYNSSCSISCDRGYLPSSMETMQCMSSGEWSAPIPACNVVECDAVTNPANGFVECFQNPGSFPWNTTCTFDCEEGFELMGAQSLQCTSSGNWDNEKPTCKAVTCRAVRQPQNGSVRCSHSPAGEFTFKSSCNFTCEEGFMLQGPAQVECTTQGQWTQQIPVCEAFQCTALSNPERGYMNCLPSASGSFRYGSSCEFSCEQGFVLKGSKRLQCGPTGEWDNEKPTCEAVRCDAVHQPPKGLVRCAHSPIGEFTYKSSCAFSCEEGFELHGSTQLECTSQGQWTEEVPSCQVVKCSSLAVPGKINMSCSGEPVFGTVCKFACPEGWTLNGSAARTCGATGHWSGLLPTCEAPTESNIPLVAGLSAAGLSLLTLAPFLLWLRKCLRKAKKFVPASSCQSLESDGSYQKPSYIL

SEQ ID NO: 31 - protein, 435 aa, Homo sapiens
MIASQFLSALTLVLLIKESGAWSYNTSTEAMTYDEASAYCQQRYTHLVAIQNKEEIEYLNSILSYSPSYYWIGIRKVNNVWVWVGTQKPLTEEAKNWAPGEPNNRQKDEDCVEIYIKREKDVGMWNDERCSKKKLALCYTAACTNTSCSGHGECVETINNYTCKCDPGFSGLKCEQIVNCTALESPEHGSLVCSHPLGNFSYNSSCSISCDRGYLPSSMETMQCMSSGEWSAPIPACNVVECDAVTNPANGFVECFQNPGSFPWNTTCTFDCEEGFELMGAQSLQCTSSGNWDNEKPTCKAVTCRAVRQPQNGSVRCSHSPAGEFTFKSSCNFTCEEGFMLQGPAQVECTTQGQWTQQIPVCEAFQCTALSNPERGYMNCLPSASGSFRYGSSCEFSCEQGFVLKGSKRLQCGPTGEWDNEKPTCEGTVFVFILF

SEQ ID NO: 32 - protein, 242 aa, Homo sapiens
MIASQFLSALTLVLLIKESGAWSYNTSTEAMTYDEASAYCQQRYTHLVAIQNKEEIEYLNSILSYSPSYYWIGIRKVNNVWVWVGTQKPLTEEAKNWAPGEPNNRQKDEDCVEIYIKREKDVGMWNDERCSKKKLALCYTAACTNTSCSGHGECVETINNYTCKCDPGFSGLKCEQIVNCTALESPEHGSLVCSHPLGNFSYNSSCSISCDRGYLPSSMETMQCMSSGEWSAPIPACNGKSL

SEQ ID NO: 33 - protein, 189 aa, Homo sapiens
MIASQFLSALTLVLLIKESGAWSYNTSTEAMTYDEASAYCQQRYTHLVAIQNKEEIEYLNSILSYSPSYYWIGIRKVNNVWVWVGTQKPLTEEAKNWAPGEPNNRQKDEDCVEIYIKREKDVGMWNDERCSKKKLALCYTAACTNTSCSGHGECVETINNYTCKCDPGFSGLKCEQSKSGSCLFLHLRW

SEQ ID NO: 34 - DNA, 1276 bp, Homo sapiens
gtcggcagcataaaaagaccagcagatgccccacagcactgctcttccagaggcaagaccaaccaagatgagtgccctgggagctgtcattgccctcctgctctggggacagctttttgcagtggactcaggcaatgatgtcacggatatcgcagatgacggctgcccgaagccccccgagattgcacatggctatgtggagcactcggttcgctaccagtgtaagaactactacaaactgcgcacagaaggagatggagtgtacaccttaaacaatgagaagcagtggataaataaggctgttggagataaacttcctgaatgtgaagcagtatgtgggaagcccaagaatccggcaaacccagtgcagcggatcctgggtggacacctggatgccaaaggcagctttccctggcaggctaagatggtttcccaccataatctcaccacaggtgccacgctgatcaatgaacaatggctgctgaccacggctaaaaatctcttcctgaaccattcagaaaatgcaacagcgaaagacattgcccctactttaacactctatgtggggaaaaagcagcttgtagagattgagaaggttgttctacaccctaactactcccaggtagatattgggctcatcaaactcaaacagaaggtgtctgttaatgagagagtgatgcccatctgcctaccttcaaaggattatgcagaagtagggcgtgtgggttatgtttctggctgggggcgaaatgccaattttaaatttactgaccatctgaagtatgtcatgctgcctgtggctgaccaagaccaatgcataaggcattatgaaggcagcacagtccccgaaaagaagacaccgaagagccctgtaggggtgcagcccatactgaatgaacacaccttctgtgctggcatgtctaagtaccaagaagacacctgctatggcgatgcgggcagtgcctttgccgttcacgacctggaggaggacacctggtatgcgactgggatcttaagctttgataagagctgtgctgtggctgagtatggtgtgtatgtgaaggtgacttccatccaggactgggttcagaagaccatagctgagaactaatgcaaggctggccggaagcccttgcctgaaagcaagatttcagcctggaagagggcaaagtggacgggagtggacaggagtggatgcgataagatgtggtttgaagctgatgggtgccagccctgcattgctgagtcaatcaataaagagctttcttttgaccca

SEQ ID NO: 35 - DNA, 2213 bp, Homo sapiens
gtcggcagcataaaaagaccagcagatgccccacagcactgctcttccagaggcaagaccaaccaagatgagtgccctgggagctgtcattgccctcctgctctggggacagctttttgcagtggactcaggcaatgatgtcacggatatcgcagatgacggctgcccgaagccccccgagattgcacatggctatgtggagcactcggttcgctaccagtgtaagaactactacaaactgcgcacagaaggagatggtaagatgtggacaactgtctccatgccctacatacaacccccttctctgacatttccatgatgggtggtgctgaggtgattcgccagaaagttcgttgctctccttggagccaggagatttagattctaataagcgttttgtcgccagtagccatggccctttgggcagactaacttttgtcagcctcaagttttctgttttgttaaggggaggcgatgccatgcagcctacctcatgtaaatctcagagtcagatttacatctccagcagatgtgggaaaagaaggaatgctgatgatgatgtcaccctcacctagtgagtcttgctgtcctggcactgctctaagggctttatacttatttgctcacttagtcctcacagtatccctctgaacagagtttattgttttcactttgctgataaggaaactgaggcacagacaggttgagtatcttgcccaaattcaggcagcctgtaagaggcagagtcaggatttgaaccctgagccctccctgtactgcttggctgtgaccgccatgaccacagtgtgttctgctgggcttaactggtgtccaggcacttggcttccagcacagcactctttcccttcctccttctcatattctctctcctttctcccttcctgtctgcctcctttcttcttcttctttttaattcttctccttaaatgccttctcactctgctctgggtgcagacttgacttttcctttggctcatttcttgccttttgtttcaggagtatacaccttaaatgataagaagcagtggataaataaggctgttggagataaacttcctgaatgtgaagcagatgacggctgcccgaagccccccgagattgcacatggctatgtggagcactcggttcgctaccagtgtaagaactactacaaactgcgcacagaaggagatggagtgtacaccttaaacaatgagaagcagtggataaataaggctgttggagataaacttcctgaatgtgaagcagtatgtgggaagcccaagaatccggcaaacccagtgcagcggatcctgggtggacacctggatgccaaaggcagctttccctggcaggctaagatggtttcccaccataatctcaccacaggtgccacgctgatcaatgaacaatggctgctgaccacggctaaaaatctcttcctgaaccattcagaaaatgcaacagcgaaagacattgcccctactttaacactctatgtggggaaaaagcagcttgtagagattgagaaggttgttctacaccctaactactcccaggtagatattgggctcatcaaactcaaacagaaggtgtctgttaatgagagagtgatgcccatctgcctaccttcaaaggattatgcagaagtagggcgtgtgggttatgtttctggctgggggcgaaatgccaattttaaatttactgaccatctgaagtatgtcatgctgcctgtggctgaccaagaccaatgcataaggcattatgaaggcagcacagtccccgaaaagaagacaccgaagagccctgtaggggtgcagcccatactgaatgaacacaccttctgtgctggcatgtctaagtaccaagaagacacctgctatggcgatgcgggcagtgcctttgccgttcacgacctggaggaggacacctggtatgcgactgggatcttaagctttgataagagctgtgctgtggctgagtatggtgtgtatgtgaaggtgacttccatccaggactgggttcagaagaccatagctgagaactaatgcaaggctggccggaagcccttgcctgaaagcaagatttcagcctggaagagggcaaagtggacgggagtggacaggagtggatgcgataagatgtggtttgaagctgatgggtgccagccctgcattgctgagtcaatcaataaagagctttcttttgaccca

SEQ ID NO: 36 - DNA, 2211 bp, Homo sapiens
gtcggcagcataaaaagaccagcagatgccccacagcactgctcttccagaggcaagaccaaccaagatgagtgccctgggagctgtcattgccctcctgctctggggacagctttttgcagtggactcaggcaatgatgtcacggatatcgcagatgacggctgcccgaagccccccgagattgcacatggctatgtggagcactcggttcgctaccagtgtaagaactactacaaactgcgcacagaaggagatggagtatacaccttaaatgataagaagcagtggataaataaggctgttggagataaacttcctgaatgtgaagcagatgacggctgcccgaagccccccgagattgcacatggctatgtggagcactcggttcgctaccagtgtaagaactactacaaactgcgcacagaaggagatggtaagatgtggacaactgtctccatgccctacatacaacccccttctctgacatttccatgatgggtggtgctgaggtgattcgccagaaagttcgttgctctccttggagccaggagatttagattctaataagcgttttgtcgccagtagccatggccctttgggcagactaacttttgtcagcctcaagttttctgttttgttaaggggaggcgatgccatgcagcctacctcatgtaaatctcagagtcagatttacatctccagcagatgtgggaaaagaaggaatgctgatgatgatgtcaccctcacctagtgagtcttgctgtcctggcactgctctaagggctttatacttatttgctcacttagtcctcacagtatccctctgaacagagtttattgttttcactttgctgataaggaaactgaggcacagacaggttgagtatcttgcccaaattcaggcagcctgtaagaggcagagtcaggatttgaaccctgagccctccctgtactgcttggctgtgaccgccatgaccacagtgtgttctgctgggcttaactggcatccaggcacttggcttccagcacagcactctttcccttcctccttctcatatactctctccttttccccttcctttttgtccccttttcctcttccttttagttcttctctttaaatgccttctcactctgcacggggtctagacttgacttctcctttggctcacttcttgccttttgtttcaggagtgtacaccttaaacaatgagaagcagtggataaataaggctgttggagataaacttcctgaatgtgaagcagtatgtgggaagcccaagaatccggcaaacccagtgcagcggatcctgggtggacacctggatgccaaaggcagctttccctggcaggctaagatggtttcccaccataatctcaccacaggtgccacgctgatcaatgaacaatggctgctgaccacggctaaaaatctcttcctgaaccattcagaaaatgcaacagcgaaagacattgcccctactttaacactctatgtggggaaaaagcagcttgtagagattgagaaggttgttctacaccctaactactcccaggtagatattgggctcatcaaactcaaacagaaggtgtctgttaatgagagagtgatgcccatctgcctaccttcaaaggattatgcagaagtagggcgtgtgggttatgtttctggctgggggcgaaatgccaattttaaatttactgaccatctgaagtatgtcatgctgcctgtggctgaccaagaccaatgcataaggcattatgaaggcagcacagtccccgaaaagaagacaccgaagagccctgtaggggtgcagcccatactgaatgaacacaccttctgtgctggcatgtctaagtaccaagaagacacctgctatggcgatgcgggcagtgcctttgccgttcacgacctggaggaggacacctggtatgcgactgggatcttaagctttgataagagctgtgctgtggctgagtatggtgtgtatgtgaaggtgacttccatccaggactgggttcagaagaccatagctgagaactaatgcaaggctggccggaagcccttgcctgaaagcaagatttcagcctggaagagggcaaagtggacgggagtggacaggagtggatgcgataagatgtggtttgaagctgatgggtgccagccctgcattgctgagtcaatcaataaagagctttcttttgaccca

SEQ ID NO: 37 - DNA, 2376 bp, Homo sapiens
gtcggcagcataaaaagaccagcagatgccccacagcactgctcttccagaggcaagaccaaccaagatgagtgccctgggagctgtcattgccctcctgctctggggacagctttttgcagtggactcaggcaatgatgtcacggatatcgcagatgacggctgcccgaagccccccgagattgcacatggctatgtggagcactcggttcgctaccagtgtaagaactactacaaactgcgcacagaaggagatggagtatacaccttaaatgataagaagcagtggataaataaggctgttggagataaacttcctgaatgtgaagcagatgacggctgcccgaagccccccgagattgcacatggctatgtggagcactcggttcgctaccagtgtaagaactactacaaactgcgcacagaaggagatggagtgtacaccttaaacaatgagaagcagtggataaataaggctgttggagataaacttcctgaatgtgaagcaggtgggtgctgagcacttaagagagcaggcaggcgtccagcggggaacgtcctagaggcacagccttccagtgcggcttcctctgagcacacaagagccaggaggagggatgtgggagaaccgcagctggccagggagagacttaagcagttaggtgatgactccctaagggtcaccaagggtcttgttcattagggcctgaagggcactggctgaatccattgtctacatcgcccacagattaggagagcctgtgcatacagagagcctgctagagagccctgggtctaaggagaagcaagctccagggagaacaagtcaaggaatgacataaaatcttaatccatggaagcctagcaggaggctggacatgggctggaactcctgcttctcgttattaggaggagctgttgctctctcctttcattctcagaacaagaggcaaaggcccagcctcttctgctcttactggtgtggaaatgccaacctgcctcgtattaactgcaccatctacaaaatctgagctccagccagtgctgctctagattcatctttctttagagagaatgaattattgtagcccctagccctttcaatgaatttcagggaattgtggaaattcctttattgggataattgtttaaatataatacagttcaccagccagggctcaaaaatctcagtatttcccacttcctttgttagaaaagtgggaaatagagctttttgtaatgtaaacaatttaaaaaacagaattattttaaaactgcaactattggaaatgagatcagcaggtggtaagggcaaagcatttaaatctttctactttacgcagcagtgacagccgcccatgctttcacccctttctcagatggaaaggctcttgcacatttccactcacgagtgtcttgctctccttgacagtatgtgggaagcccaagaatccggcaaacccagtgcagcggatcctgggtggacacctggatgccaaaggcagctttccctggcaggctaagatggtttcccaccataatctcaccacaggtgccacgctgatcaatgaacaatggctgctgaccacggctaaaaatctcttcctgaaccattcagaaaatgcaacagcgaaagacattgcccctactttaacactctatgtggggaaaaagcagcttgtagagattgagaaggttgttctacaccctaactactcccaggtagatattgggctcatcaaactcaaacagaaggtgtctgttaatgagagagtgatgcccatctgcctaccttcaaaggattatgcagaagtagggcgtgtgggttatgtttctggctgggggcgaaatgccaattttaaatttactgaccatctgaagtatgtcatgctgcctgtggctgaccaagaccaatgcataaggcattatgaaggcagcacagtccccgaaaagaagacaccgaagagccctgtaggggtgcagcccatactgaatgaacacaccttctgtgctggcatgtctaagtaccaagaagacacctgctatggcgatgcgggcagtgcctttgccgttcacgacctggaggaggacacctggtatgcgactgggatcttaagctttgataagagctgtgctgtggctgagtatggtgtgtatgtgaaggtgacttccatccaggactgggttcagaagaccatagctgagaactaatgcaaggctggccggaagcccttgcctgaaagcaagatttcagcctggaagagggcaaagtggacgggagtggacaggagtggatgcgataagatgtggtttgaagctgatgggtgccagccctgcattgctgagtcaatcaataaagagctttcttttgaccca

SEQ ID NO: 38 - DNA, 1276 bp, Homo sapiens
gtcggcagcataaaaagaccagcagatgccccacagcactgctcttccagaggcaagaccaaccaagatgagtgccctgggagctgtcattgccctcctgctctggggacagctttttgcagtggactcaggcaatgatgtcacggatatcgcagatgacggctgcccgaagccccccgagattgcacatggctatgtggagcactcggttcgctaccagtgtaagaactactacaaactgcgcacagaaggagatggagtatacaccttaaatgataagaagcagtggataaataaggctgttggagataaacttcctgaatgtgaagcagtatgtgggaagcccaagaatccggcaaacccagtgcagcggatcctgggtggacacctggatgccaaaggcagctttccctggcaggctaagatggtttcccaccataatctcaccacaggtgccacgctgatcaatgaacaatggctgctgaccacggctaaaaatctcttcctgaaccattcagaaaatgcaacagcgaaagacattgcccctactttaacactctatgtggggaaaaagcagcttgtagagattgagaaggttgttctacaccctaactactcccaggtagatattgggctcatcaaactcaaacagaaggtgtctgttaatgagagagtgatgcccatctgcctaccttcaaaggattatgcagaagtagggcgtgtgggttatgtttctggctgggggcgaaatgccaattttaaatttactgaccatctgaagtatgtcatgctgcctgtggctgaccaagaccaatgcataaggcattatgaaggcagcacagtccccgaaaagaagacaccgaagagccctgtaggggtgcagcccatactgaatgaacacaccttctgtgctggcatgtctaagtaccaagaagacacctgctatggcgatgcgggcagtgcctttgccgttcacgacctggaggaggacacctggtatgcgactgggatcttaagctttgataagagctgtgctgtggctgagtatggtgtgtatgtgaaggtgacttccatccaggactgggttcagaagaccatagctgagaactaatgcaaggctggccggaagcccttgcctgaaagcaagatttcagcctggaagagggcaaagtggacgggagtggacaggagtggatgcgataagatgtggtttgaagctgatgggtgccagccctgcattgctgagtcaatcaataaagagctttcttttgaccca

SEQ ID NO: 39 - DNA, 1184 bp, Homo sapiens
gtcggcagcataaaaagaccagcagatgccccacagcactgctcttccagaggcaagaccaaccaagatgagtgccctgggagctgtcattgccctcctgctctggggacagctttttgcagtggactcaggcaatgatgtcacggatatcgcagatgacggctgcccgaagccccccgagattgcacatggctatgtggagcactcggttcgctaccagtgtaagaactactacaaactgcgcacagaaggagatgaatccggcaaacccagtgcagcggatcctgggtggacacctggatgccaaaggcagctttccctggcaggctaagatggtttcccaccataatctcaccacaggtgccacgctgatcaatgaacaatggctgctgaccacggctaaaaatctcttcctgaaccattcagaaaatgcaacagcgaaagacattgcccctactttaacactctatgtggggaaaaagcagcttgtagagattgagaaggttgttctacaccctaactactcccaggtagatattgggctcatcaaactcaaacagaaggtgtctgttaatgagagagtgatgcccatctgcctaccttcaaaggattatgcagaagtagggcgtgtgggttatgtttctggctgggggcgaaatgccaattttaaatttactgaccatctgaagtatgtcatgctgcctgtggctgaccaagaccaatgcataaggcattatgaaggcagcacagtccccgaaaagaagacaccgaagagccctgtaggggtgcagcccatactgaatgaacacaccttctgtgctggcatgtctaagtaccaagaagacacctgctatggcgatgcgggcagtgcctttgccgttcacgacctggaggaggacacctggtatgcgactgggatcttaagctttgataagagctgtgctgtggctgagtatggtgtgtatgtgaaggtgacttccatccaggactgggttcagaagaccatagctgagaactaatgcaaggctggccggaagcccttgcctgaaagcaagatttcagcctggaagagggcaaagtggacgggagtggacaggagtggatgcgataagatgtggtttgaagctgatgggtgccagccctgcattgctgagtcaatcaataaagagctttcttttgaccca

SEQ ID NO: 40 - DNA, 1333 bp, Homo sapiens
gtcggcagcataaaaagaccagcagatgccccacagcactgctcttccagaggcaagaccaaccaagatgagtgccctgggagctgtcattgccctcctgctctggggacagctttttgcagtggactcaggcaatgatgtcacggatatcgcagatgacggctgcccgaagccccccgagattgcacatggctatgtggagcactcggttcgctaccagtgtaagaactactacaaactgcgcacagaaggagatggagtatacaccttaaatgataagaagcagtggataaataaggctgttggagataaacttcctgaatgtgaagcagatgacggctgcccgaagccccccgagattgcacatggctatgtggagcactcggttcgctaccagtgtaagaactactacaaactgcgcacagaaggagatggagtgtacaccttaaacaatgagaagcagtggataaataaggctgttggagataaacttcctgaatgtgaagcaggtgccacgctgatcaatgaacaatggctgctgaccacggctaaaaatctcttcctgaaccattcagaaaatgcaacagcgaaagacattgcccctactttaacactctatgtggggaaaaagcagcttgtagagattgagaaggttgttctacaccctaactactcccaggtagatattgggctcatcaaactcaaacagaaggtgtctgttaatgagagagtgatgcccatctgcctaccttcaaaggattatgcagaagtagggcgtgtgggttatgtttctggctgggggcgaaatgccaattttaaatttactgaccatctgaagtatgtcatgctgcctgtggctgaccaagaccaatgcataaggcattatgaaggcagcacagtccccgaaaagaagacaccgaagagccctgtaggggtgcagcccatactgaatgaacacaccttctgtgctggcatgtctaagtaccaagaagacacctgctatggcgatgcgggcagtgcctttgccgttcacgacctggaggaggacacctggtatgcgactgggatcttaagctttgataagagctgtgctgtggctgagtatggtgtgtatgtgaaggtgacttccatccaggactgggttcagaagaccatagctgagaactaatgcaaggctggccggaagcccttgcctgaaagcaagatttcagcctggaagagggcaaagtggacgggagtggacaggagtggatgcgataagatgtggtttgaagctgatgggtgccagccctgcattgctgagtcaatcaataaagagctttcttttgaccca

SEQ ID NO: 41 - DNA, 1132 bp, Homo sapiens
gtcggcagcataaaaagaccagcagatgccccacagcactgctcttccagaggcaagaccaaccaagatgagtgccctgggagctgtcattgccctcctgctctggggacagctttttgcagtggactcaggcaatgatgtcacggatatcgcagatgacggctgcccgaagccccccgagattgcacatggctatgtggagcactcggttcgctaccagttgcagcggatcctgggtggacacctggatgccaaaggcagctttccctggcaggctaagatggtttcccaccataatctcaccacaggtgccacgctgatcaatgaacaatggctgctgaccacggctaaaaatctcttcctgaaccattcagaaaatgcaacagcgaaagacattgcccctactttaacactctatgtggggaaaaagcagcttgtagagattgagaaggttgttctacaccctaactactcccaggtagatattgggctcatcaaactcaaacagaaggtgtctgttaatgagagagtgatgcccatctgcctaccttcaaaggattatgcagaagtagggcgtgtgggttatgtttctggctgggggcgaaatgccaattttaaatttactgaccatctgaagtatgtcatgctgcctgtggctgaccaagaccaatgcataaggcattatgaaggcagcacagtccccgaaaagaagacaccgaagagccctgtaggggtgcagcccatactgaatgaacacaccttctgtgctggcatgtctaagtaccaagaagacacctgctatggcgatgcgggcagtgcctttgccgttcacgacctggaggaggacacctggtatgcgactgggatcttaagctttgataagagctgtgctgtggctgagtatggtgtgtatgtgaaggtgacttccatccaggactgggttcagaagaccatagctgagaactaatgcaaggctggccggaagcccttgcctgaaagcaagatttcagcctggaagagggcaaagtggacgggagtggacaggagtggatgcgataagatgtggtttgaagctgatgggtgccagccctgcattgctgagtcaatcaataaagagctttcttttgaccca

SEQ ID NO: 42 - DNA, 1156 bp, Homo sapiens
gtcggcagcataaaaagaccagcagatgccccacagcactgctcttccagaggcaagaccaaccaagatgagtgccctgggagctgtcattgccctcctgctctggggacagctttttgcagtggactcaggcaatgatgtcacggatatcgcagatgacggctgcccgaagccccccgagattgcacatggctatgtggagcactcggttcgctaccagtgtaagaactactacaaactgcgcacagaaggagatggagtatacaccttaaatgataagaagcagtggataaataaggctgttggagataaacttcctgaatgtgaagcaggtgccacgctgatcaatgaacaatggctgctgaccacggctaaaaatctcttcctgaaccattcagaaaatgcaacagcgaaagacattgcccctactttaacactctatgtggggaaaaagcagcttgtagagattgagaaggttgttctacaccctaactactcccaggtagatattgggctcatcaaactcaaacagaaggtgtctgttaatgagagagtgatgcccatctgcctaccttcaaaggattatgcagaagtagggcgtgtgggttatgtttctggctgggggcgaaatgccaattttaaatttactgaccatctgaagtatgtcatgctgcctgtggctgaccaagaccaatgcataaggcattatgaaggcagcacagtccccgaaaagaagacaccgaagagccctgtaggggtgcagcccatactgaatgaacacaccttctgtgctggcatgtctaagtaccaagaagacacctgctatggcgatgcgggcagtgcctttgccgttcacgacctggaggaggacacctggtatgcgactgggatcttaagctttgataagagctgtgctgtggctgagtatggtgtgtatgtgaaggtgacttccatccaggactgggttcagaagaccatagctgagaactaatgcaaggctggccggaagcccttgcctgaaagcaagatttcagcctggaagagggcaaagtggacgggagtggacaggagtggatgcgataagatgtggtttgaagctgatgggtgccagccctgcattgctgagtcaatcaataaagagctttcttttgaccca

SEQ ID NO: 43 - DNA, 1007 bp, Homo sapiens
gtcggcagcataaaaagaccagcagatgccccacagcactgctcttccagaggcaagaccaaccaagatgagtgccctgggagctgtcattgccctcctgctctggggacagctttttgcagtggactcaggcaatgatgtcacggatatcgcagatggtttcccaccataatctcaccacaggtgccacgctgatcaatgaacaatggctgctgaccacggctaaaaatctcttcctgaaccattcagaaaatgcaacagcgaaagacattgcccctactttaacactctatgtggggaaaaagcagcttgtagagattgagaaggttgttctacaccctaactactcccaggtagatattgggctcatcaaactcaaacagaaggtgtctgttaatgagagagtgatgcccatctgcctaccttcaaaggattatgcagaagtagggcgtgtgggttatgtttctggctgggggcgaaatgccaattttaaatttactgaccatctgaagtatgtcatgctgcctgtggctgaccaagaccaatgcataaggcattatgaaggcagcacagtccccgaaaagaagacaccgaagagccctgtaggggtgcagcccatactgaatgaacacaccttctgtgctggcatgtctaagtaccaagaagacacctgctatggcgatgcgggcagtgcctttgccgttcacgacctggaggaggacacctggtatgcgactgggatcttaagctttgataagagctgtgctgtggctgagtatggtgtgtatgtgaaggtgacttccatccaggactgggttcagaagaccatagctgagaactaatgcaaggctggccggaagcccttgcctgaaagcaagatttcagcctggaagagggcaaagtggacgggagtggacaggagtggatgcgataagatgtggtttgaagctgatgggtgccagccctgcattgctgagtcaatcaataaagagctttcttttgaccca

SEQ ID NO: 44 - DNA, 725 bp, Homo sapiens
gtcggcagcataaaaagaccagcagatgccccacagcactgctcttccagaggcaagaccaaccaagatgagtgccctgggagctgtcattgccctcctgctctggggacagctttttgcagtggactcaggcaatgatgtcacggatatcgcagatgacggctgcccgaagccccccgagattgcacatggctatgtggagcactcggttcgctaccagtgtaagaactactacaaactgcgcacagaaggagatggagtgtacaccttaaacaatgagaagcagtggataaataaggctgttggagataaacttcctgaatgtgaagcagcccatactgaatgaacacaccttctgtgctggcatgtctaagtaccaagaagacacctgctatggcgatgcgggcagtgcctttgccgttcacgacctggaggaggacacctggtatgcgactgggatcttaagctttgataagagctgtgctgtggctgagtatggtgtgtatgtgaaggtgacttccatccaggactgggttcagaagaccatagctgagaactaatgcaaggctggccggaagcccttgcctgaaagcaagatttcagcctggaagagggcaaagtggacgggagtggacaggagtggatgcgataagatgtggtttgaagctgatgggtgccagccctgcattgctgagtcaatcaataaagagctttcttttgaccca

SEQ ID NO: 45 - DNA, 768 bp, Homo sapiens
gtcggcagcataaaaagaccagcagatgccccacagcactgctcttccagaggcaagaccaaccaagatgagtgccctgggagctgtcattgccctcctgctctggggacagctttttgcagtggactcaggcaatgatgtcacggatatcgcagatgacggctgcccgaagccccccgagattgcacatggctatgtggagcactcggttcgctaccagtgtaagaactactacaaactgcgcacagaaggagatggagtgtacaccttaaacaatgagaagcagtggataaataaggctgttggagataaacttcctgaatgtgaagcagtatgtgggaagcccaagaatccggcaaacccagtgcagcggatcctgggtggacacctggatgccaaaggcagctttccctggcaggctaagatggtttcccaccataatctcaccacagtgcctttgccgttcacgacctggaggaggacacctggtatgcgactgggatcttaagctttgataagagctgtgctgtggctgagtatggtgtgtatgtgaaggtgacttccatccaggactgggttcagaagaccatagctgagaactaatgcaaggctggccggaagcccttgcctgaaagcaagatttcagcctggaagagggcaaagtggacgggagtggacaggagtggatgcgataagatgtggtttgaagctgatgggtgccagccctgcattgctgagtcaatcaataaagagctttcttttgaccca

SEQ ID NO: 46 - DNA, 920 bp, Homo sapiens
gtcggcagcataaaaagaccagcagatgccccacagcactgctcttccagaggcaagaccaaccaagatgagtgccctgggagctgtcattgccctcctgctctggggacagctttttgcagtggactcaggcaatgatgtcacggatatcgcagatgacggctgcccgaagccccccgagattgcacatggctatgtggagcactcggttcgctaccagtgtaagaactactacaaactgcgcacagaaggagatggagtatacaccttaaatgataagaagcagtggataaataaggctgttggagataaacttcctgaatgtgaagcaggtgggtgctgagcactgagcacttaagagagcaggcaggcgtccagcggggaacgtcctagaggcacagccttccagtgcggcttcctctgagcacacaagagccaggaggagggatgtgggagaaccgcagctggccagggagagacttaagcagttaggtgatgactccctaagggtcaccaagggtcttgttcattggggcctgaagggcactggctgaatccactgtcggcactgcccacagatcaggagagcctgtgcatacagagagcctgctagaaagccctgggtctaaggagaagcaagctccagggagaacaagtcaaggaatgacataaaatcttaatccatggaagcctagcaggaggctggacatgggctggaactcctgcttctcgttattaggaggagctgttgctctctcctttcattctcagaaccagaggcaaagacccagcctcttctgctcttactggtgtggaaatgccaacctgcctcgtattaactgcaccatctacaaaatctgagctccagccagtgctgctctagattcatctttctttagagagaatgaattattgtagcc

SEQ ID NO: 47 - DNA, 760 bp, Artificial
  Synthetic oligonucleotide
gtaagatgtggacaactgtctccatgccctacatacaacccccttctctgacatttccatgatgggtggtgctgaggtgattcgccagaaagttcgttgctctccttggagccaggagatttagattctaataagcgttttgtcgccagtagccatggccctttgggcagactaacttttgtcagcctcaagttttctgttttgttaaggggaggcgatgccatgcagcctacctcatgtaaatctcagagtcagatttacatctccagcagatgtgggaaaagaaggaatgctgatgatgatgtcaccctcacctagtgagtcttgctgtcctggcactgctctaagggctttatacttatttgctcacttagtcctcacagtatccctctgaacagagtttattgttttcactttgctgataaggaaactgaggcacagacaggttgagtatcttgcccaaattcaggcagcctgtaagaggcagagtcaggatttgaaccctgagccctccctgtactgcttggctgtgaccgccatgaccacagtgtgttctgctgggcttaactggtgtccaggcacttggcttccagcacagcactctttcccttcctccttctcatattctctctcctttctcccttcctgtctgcctcctttcttcttcttctttttaattcttctccttaaatgccttctcactctgctctgggtgcagacttgacttttcctttggctcatttcttgccttttgtttcag

SEQ ID NO: 48 - DNA, 588 bp, Artificial
  Synthetic oligonucleotide
gtgggtgctgagcactgagcacttaagagagcaggcaggcgtccagcggggaacgtcctagaggcacagccttccagtgcggcttcctctgagcacacaagagccaggaggagggatgtgggagaaccgcagctggccagggagagacttaagcagttaggtgatgactccctaagggtcaccaagggtcttgttcattggggcctgaagggcactggctgaatccactgtcggcactgcccacagatcaggagagcctgtgcatacagagagcctgctagaaagccctgggtctaaggagaagcaagctccagggagaacaagtcaaggaatgacataaaatcttaatccatggaagcctagcaggaggctggacatgggctggaactcctgcttctcgttattaggaggagctgttgctctctcctttcattctcagaaccagaggcaaagacccagcctcttctgctcttactggtgtggaaatgccaacctgcctcgtattaactgcaccatctacaaaatctgagctccagccagtgctgctctagattcatctttctttagagagaatgaattattgtagcc

SEQ ID NO: 49 - DNA, 758 bp, Artificial
  Synthetic oligonucleotide
gtaagatgtggacaactgtctccatgccctacatacaacccccttctctgacatttccatgatgggtggtgctgaggtgattcgccagaaagttcgttgctctccttggagccaggagatttagattctaataagcgttttgtcgccagtagccatggccctttgggcagactaacttttgtcagcctcaagttttctgttttgttaaggggaggcgatgccatgcagcctacctcatgtaaatctcagagtcagatttacatctccagcagatgtgggaaaagaaggaatgctgatgatgatgtcaccctcacctagtgagtcttgctgtcctggcactgctctaagggctttatacttatttgctcacttagtcctcacagtatccctctgaacagagtttattgttttcactttgctgataaggaaactgaggcacagacaggttgagtatcttgcccaaattcaggcagcctgtaagaggcagagtcaggatttgaaccctgagccctccctgtactgcttggctgtgaccgccatgaccacagtgtgttctgctgggcttaactggcatccaggcacttggcttccagcacagcactctttcccttcctccttctcatatactctctccttttccccttcctttttgtccccttttcctcttccttttagttcttctctttaaatgccttctcactctgcacggggtctagacttgacttctcctttggctcacttcttgccttttgtttcag

SEQ ID NO: 50 - DNA, 909 bp, Artificial
  Synthetic oligonucleotide
cttaagagagcaggcaggcgtccagcggggaacgtcctagaggcacagccttccagtgcggcttcctctgagcacacaagagccaggaggagggatgtgggagaaccgcagctggccagggagagacttaagcagttaggtgatgactccctaagggtcaccaagggtcttgttcattagggcctgaagggcactggctgaatccattgtctacatcgcccacagattaggagagcctgtgcatacagagagcctgctagagagccctgggtctaaggagaagcaagctccagggagaacaagtcaaggaatgacataaaatcttaatccatggaagcctagcaggaggctggacatgggctggaactcctgcttctcgttattaggaggagctgttgctctctcctttcattctcagaacaagaggcaaaggcccagcctcttctgctcttactggtgtggaaatgccaacctgcctcgtattaactgcaccatctacaaaatctgagctccagccagtgctgctctagattcatctttctttagagagaatgaattattgtagcccctagccctttcaatgaatttcagggaattgtggaaattcctttattgggataattgtttaaatataatacagttcaccagccagggctcaaaaatctcagtatttcccacttcctttgttagaaaagtgggaaatagagctttttgtaatgtaaacaatttaaaaaacagaattattttaaaactgcaactattggaaatgagatcagcaggtggtaagggcaaagcatttaaatctttctactttacgcagcagtgacagccgcccatgctttcacccctttctcagatggaaaggctcttgcacatttccactcacgagtgtcttgctctccttgacag

SEQ ID NO: 51 - DNA, 181 bp, Artificial
  Synthetic oligonucleotide
cctggaagagggcaaagtggacgggagtggacaggagtggatgcgataagatgtggtttgaagctgatgggtgccagccctgcattgctgagtcaatcaataaagagctttcttttgacccatttctgtgttgtgttcagtcttgagtcttttttatttgctcctttatggtccagggtag

SEQ ID NO: 52 - DNA, 63 bp, Artificial
  Synthetic oligonucleotide
gtcggcagcataaaaagaccagcagatgccccacagcactgctcttccagaggcaagaccaac

SEQ ID NO: 53 - DNA, 9 bp, Artificial
  Synthetic oligonucleotide
caagatgag

SEQ ID NO: 54 - DNA, 25 bp, Artificial
  Synthetic oligonucleotide
tgccctgggagctgtcattgccctc

SEQ ID NO: 55 - DNA, 15 bp, Artificial
  Synthetic oligonucleotide
ctgctctggggacag

SEQ ID NO: 56 - DNA, 32 bp, Artificial
  Synthetic oligonucleotide
ctttttgcagtggactcaggcaatgatgtcac

SEQ ID NO: 57 - DNA, 6 bp, Artificial
  Synthetic oligonucleotide
ggatat

SEQ ID NO: 58 - DNA, 5 bp, Artificial
  Synthetic oligonucleotide
cgcag

SEQ ID NO: 59 - DNA, 33 bp, Artificial
  Synthetic oligonucleotide
atgacggctgcccgaagccccccgagattgcac

SEQ ID NO: 60 - DNA, 4 bp, Artificial
  Synthetic oligonucleotide
atgg

SEQ ID NO: 61 - DNA, 4 bp, Artificial
  Synthetic oligonucleotide
ctat

SEQ ID NO: 62 - DNA, 21 bp, Artificial
  Synthetic oligonucleotide
gtggagcactcggttcgctac

SEQ ID NO: 63 - DNA, 4 bp, Artificial
  Synthetic oligonucleotide
cagt

SEQ ID NO: 64 - DNA, 10 bp, Artificial
  Synthetic oligonucleotide
gtaagaacta

SEQ ID NO: 65 - DNA, 7 bp, Artificial
  Synthetic oligonucleotide
ctacaaa

SEQ ID NO: 66 - DNA, 5 bp, Artificial
  Synthetic oligonucleotide
ctgcg

SEQ ID NO: 67 - DNA, 4 bp, Artificial
  Synthetic oligonucleotide
caca

SEQ ID NO: 68 - DNA, 10 bp, Artificial
  Synthetic oligonucleotide
gaaggagatg

SEQ ID NO: 69 - DNA, 26 bp, Artificial
  Synthetic oligonucleotide
gagtatacaccttaaatgataagaag

SEQ ID NO: 70 - DNA, 16 bp, Artificial
  Synthetic oligonucleotide
cagtggataaataagg

SEQ ID NO: 71 - DNA, 18 bp, Artificial
  Synthetic oligonucleotide
ctgttggagataaacttc

SEQ ID NO: 72 - DNA, 15 bp, Artificial
  Synthetic oligonucleotide
ctgaatgtgaagcag

SEQ ID NO: 73 - DNA, 102 bp, Artificial
  Synthetic oligonucleotide
atgacggctgcccgaagccccccgagattgcacatggctatgtggagcactcggttcgctaccagtgtaagaactactacaaactgcgcacagaaggagatg

SEQ ID NO: 74 - DNA, 20 bp, Artificial
  Synthetic oligonucleotide
gagtgtacaccttaaacaat

SEQ ID NO: 75 - DNA, 6 bp, Artificial
  Synthetic oligonucleotide
gagaag

SEQ ID NO: 76 - DNA, 6 bp, Artificial
  Synthetic oligonucleotide
cagtgg

SEQ ID NO: 77 - DNA, 10 bp, Artificial
  Synthetic oligonucleotide
ataaataagg

SEQ ID NO: 78 - DNA, 33 bp, Artificial
  Synthetic oligonucleotide
ctgttggagataaacttcctgaatgtgaagcag

SEQ ID NO: 79 - DNA, 14 bp, Artificial
  Synthetic oligonucleotide
gtgggtgctgagca

SEQ ID NO: 80 - DNA, 11 bp, Artificial
  Synthetic oligonucleotide
tatgtgggaag

SEQ ID NO: 81 - DNA, 6 bp, Artificial
  Synthetic oligonucleotide
cccaag

SEQ ID NO: 82 - DNA, 12 bp, Artificial
  Synthetic oligonucleotide
aatccggcaaac

SEQ ID NO: 83 - DNA, 4 bp, Artificial
  Synthetic oligonucleotide
ccag

SEQ ID NO: 84 - DNA, 5 bp, Artificial
  Synthetic oligonucleotide
tgcag

SEQ ID NO: 85 - DNA, 6 bp, Artificial
  Synthetic oligonucleotide
cggatc

SEQ ID NO: 86 - DNA, 12 bp, Artificial
  Synthetic oligonucleotide
ctgggtggacac

SEQ ID NO: 87 - DNA, 23 bp, Artificial
  Synthetic oligonucleotide
ctggatgccaaaggcagctttcc

SEQ ID NO: 88 - DNA, 13 bp, Artificial
  Synthetic oligonucleotide
ctggcaggctaag

SEQ ID NO: 89 - DNA, 12 bp, Artificial
  Synthetic oligonucleotide
atggtttcccac

SEQ ID NO: 90 - DNA, 11 bp, Artificial
  Synthetic oligonucleotide
cataatctcac

SEQ ID NO: 91 - DNA, 5 bp, Artificial
  Synthetic oligonucleotide
cacag

SEQ ID NO: 92 - DNA, 21 bp, Artificial
  Synthetic oligonucleotide
gtgccacgctgatcaatgaac

SEQ ID NO: 93 - DNA, 38 bp, Artificial
  Synthetic oligonucleotide
aatggctgctgaccacggctaaaaatctcttcctgaac

SEQ ID NO: 94 - DNA, 19 bp, Artificial
  Synthetic oligonucleotide
cattcagaaaatgcaacag

SEQ ID NO: 95 - DNA, 19 bp, Artificial
  Synthetic oligonucleotide
cgaaagacattgcccctac

SEQ ID NO: 96 - DNA, 9 bp, Artificial
  Synthetic oligonucleotide
tttaacact

SEQ ID NO: 97 - DNA, 9 bp, Artificial
  Synthetic oligonucleotide
ctatgtggg

SEQ ID NO: 98 - DNA, 7 bp, Artificial
  Synthetic oligonucleotide
gaaaaag

SEQ ID NO: 99 - DNA, 42 bp, Artificial
  Synthetic oligonucleotide
cagcttgtagagattgagaaggttgttctacaccctaactac

SEQ ID NO: 100 - DNA, 6 bp, Artificial
  Synthetic oligonucleotide
tcccag

SEQ ID NO: 101 - DNA, 27 bp, Artificial
  Synthetic oligonucleotide
gtagatattgggctcatcaaactcaaa

SEQ ID NO: 102 - DNA, 35 bp, Artificial
  Synthetic oligonucleotide
cagaaggtgtctgttaatgagagagtgatgcccat

SEQ ID NO: 103 - DNA, 8 bp, Artificial
  Synthetic oligonucleotide
ctgcctac

SEQ ID NO: 104 - DNA, 8 bp, Artificial
  Synthetic oligonucleotide
cttcaaag

SEQ ID NO: 105 - DNA, 12 bp, Artificial
  Synthetic oligonucleotide
gattatgcagaa

SEQ ID NO: 106 - DNA, 11 bp, Artificial
  Synthetic oligonucleotide
gtagggcgtgt

SEQ ID NO: 107 - DNA, 44 bp, Artificial
  Synthetic oligonucleotide
gggttatgtttctggctgggggcgaaatgccaattttaaattta

SEQ ID NO: 108 - DNA, 48 bp, Artificial
  Synthetic oligonucleotide
ctgaccatctgaagtatgtcatgctgcctgtggctgaccaagaccaat

SEQ ID NO: 109 - DNA, 22 bp, Artificial
  Synthetic oligonucleotide
gcataaggcattatgaaggcag

SEQ ID NO: 110 - DNA, 9 bp, Artificial
  Synthetic oligonucleotide
cacagtccc

SEQ ID NO: 111 - DNA, 10 bp, Artificial
  Synthetic oligonucleotide
cgaaaagaag

SEQ ID NO: 112 - DNA, 27 bp, Artificial
  Synthetic oligonucleotide
acaccgaagagccctgtaggggtgcag

SEQ ID NO: 113 - DNA, 7 bp, Artificial
  Synthetic oligonucleotide
cccatac

SEQ ID NO: 114 - DNA, 9 bp, Artificial
  Synthetic oligonucleotide
tgaatgaac

SEQ ID NO: 115 - DNA, 4 bp, Artificial
  Synthetic oligonucleotide
acac

SEQ ID NO: 116 - DNA, 17 bp, Artificial
  Synthetic oligonucleotide
cttctgtgctggcatgt

SEQ ID NO: 117 - DNA, 8 bp, Artificial
  Synthetic oligonucleotide
ctaagtac

SEQ ID NO: 118 - DNA, 11 bp, Artificial
  Synthetic oligonucleotide
caagaagacac

SEQ ID NO: 119 - DNA, 21 bp, Artificial
  Synthetic oligonucleotide
ctgctatggcgatgcgggcag

SEQ ID NO: 120 - DNA, 19 bp, Artificial
  Synthetic oligonucleotide
tgcctttgccgttcacgac

SEQ ID NO: 121 - DNA, 9 bp, Artificial
  Synthetic oligonucleotide
ctggaggag

SEQ ID NO: 122 - DNA, 5 bp, Artificial
  Synthetic oligonucleotide
gacac

SEQ ID NO: 123 - DNA, 12 bp, Artificial
  Synthetic oligonucleotide
ctggtatgcgac

SEQ ID NO: 124 - DNA, 12 bp, Artificial
  Synthetic oligonucleotide
tgggatcttaag

SEQ ID NO: 125 - DNA, 12 bp, Artificial
  Synthetic oligonucleotide
ctttgataagag

SEQ ID NO: 126 - DNA, 11 bp, Artificial
  Synthetic oligonucleotide
ctgtgctgtgg

SEQ ID NO: 127 - DNA, 31 bp, Artificial
  Synthetic oligonucleotide
ctgagtatggtgtgtatgtgaaggtgacttc

SEQ ID NO: 128 - DNA, 7 bp, Artificial
  Synthetic oligonucleotide
catccag

SEQ ID NO: 129 - DNA, 12 bp, Artificial
  Synthetic oligonucleotide
gactgggttcag

SEQ ID NO: 130 - DNA, 64 bp, Artificial
  Synthetic oligonucleotide
aagaccatagctgagaactaatgcaaggctggccggaagcccttgcctgaaagcaagatttcag

SEQ ID NO: 131 - protein, 406 aa, Homo sapiens
MSALGAVIALLLWGQLFAVDSGNDVTDIADDGCPKPPEIAHGYVEHSVRYQCKNYYKLRTEGDGVYTLNDKKQWINKAVGDKLPECEADDGCPKPPEIAHGYVEHSVRYQCKNYYKLRTEGDGVYTLNNEKQWINKAVGDKLPECEAVCGKPKNPANPVQRILGGHLDAKGSFPWQAKMVSHHNLTTGATLINEQWLLTTAKNLFLNHSENATAKDIAPTLTLYVGKKQLVEIEKVVLHPNYSQVDIGLIKLKQKVSVNERVMPICLPSKDYAEVGRVGYVSGWGRNANFKFTDHLKYVMLPVADQDQCIRHYEGSTVPEKKTPKSPVGVQPILNEHTFCAGMSKYQEDTCYGDAGSAFAVHDLEEDTWYATGILSFDKSCAVAEYGVYVKVTSIQDWVQKTIAEN

SEQ ID NO: 132 - protein, 406 aa, Homo sapiens [sequence omitted]

SEQ ID NO: 133 - protein, 347 aa, Homo sapiens
MSALGAVIALLLWGQLFAVDSGNDVTDIADDGCPKPPEIAHGYVEHSVRYQCKNYYKLRTEGDGVYTLNNEKQWINKAVGDKLPECEAVCGKPKNPANPVQRILGGHLDAKGSFPWQAKMVSHHNLTTGATLINEQWLLTTAKNLFLNHSENATAKDIAPTLTLYVGKKQLVEIEKVVLHPNYSQVDIGLIKLKQKVSVNERVMPICLPSKDYAEVGRVGYVSGWGRNANFKFTDHLKYVMLPVADQDQCIRHYEGSTVPEKKTPKSPVGVQPILNEHTFCAGMSKYQEDTCYGDAGSAFAVHDLEEDTWYATGILSFDKSCAVAEYGVYVKVTSIQDWVQKTIAEN

SEQ ID NO: 134 - protein, 83 aa, Homo sapiens
MSALGAVIALLLWGQLFAVDSGNDVTDIADDGCPKPPEIAHGYVEHSVRYQCKNYYKLRTEGDGKMWTTVSMPYIQPPSLTFP

SEQ ID NO: 135 - protein, 142 aa, Homo sapiens
MSALGAVIALLLWGQLFAVDSGNDVTDIADDGCPKPPEIAHGYVEHSVRYQCKNYYKLRTEGDGVYTLNDKKQWINKAVGDKLPECEADDGCPKPPEIAHGYVEHSVRYQCKNYYKLRTEGDGKMWTTVSMPYIQPPSLTFP

SEQ ID NO: 136 - protein, 150 aa, Homo sapiens
MSALGAVIALLLWGQLFAVDSGNDVTDIADDGCPKPPEIAHGYVEHSVRYQCKNYYKLRTEGDGVYTLNDKKQWINKAVGDKLPECEADDGCPKPPEIAHGYVEHSVRYQCKNYYKLRTEGDGVYTLNNEKQWINKAVGDKLPECEAGGC

SEQ ID NO: 137 - protein, 347 aa, Homo sapiens
MSALGAVIALLLWGQLFAVDSGNDVTDIADDGCPKPPEIAHGYVEHSVRYQCKNYYKLRTEGDGVYTLNDKKQWINKAVGDKLPECEAVCGKPKNPANPVQRILGGHLDAKGSFPWQAKMVSHHNLTTGATLINEQWLLTTAKNLFLNHSENATAKDIAPTLTLYVGKKQLVEIEKVVLHPNYSQVDIGLIKLKQKVSVNERVMPICLPSKDYAEVGRVGYVSGWGRNANFKFTDHLKYVMLPVADQDQCIRHYEGSTVPEKKTPKSPVGVQPILNEHTFCAGMSKYQEDTCYGDAGSAFAVHDLEEDTWYATGILSFDKSCAVAEYGVYVKVTSIQDWVQKTIAEN

SEQ ID NO: 138 - protein, 87 aa, Homo sapiens
MSALGAVIALLLWGQLFAVDSGNDVTDIADDGCPKPPEIAHGYVEHSVRYQCKNYYKLRTEGDESGKPSAADPGWTPGCQRQLSLAG

SEQ ID NO: 139 - protein, 366 aa, Homo sapiens
MSALGAVIALLLWGQLFAVDSGNDVTDIADDGCPKPPEIAHGYVEHSVRYQCKNYYKLRTEGDGVYTLNDKKQWINKAVGDKLPECEADDGCPKPPEIAHGYVEHSVRYQCKNYYKLRTEGDGVYTLNNEKQWINKAVGDKLPECEAGATLINEQWLLTTAKNLFLNHSENATAKDIAPTLTLYVGKKQLVEIEKVVLHPNYSQVDIGLIKLKQKVSVNERVMPICLPSKDYAEVGRVGYVSGWGRNANFKFTDHLKYVMLPVADQDQCIRHYEGSTVPEKKTPKSPVGVQPILNEHTFCAGMSKYQEDTCYGDAGSAFAVHDLEEDTWYATGILSFDKSCAVAEYGVYVKVTSIQDWVQKTIAEN

SEQ ID NO: 140 - protein, 299 aa, Homo sapiens
MSALGAVIALLLWGQLFAVDSGNDVTDIADDGCPKPPEIAHGYVEHSVRYQLQRILGGHLDAKGSFPWQAKMVSHHNLTTGATLINEQWLLTTAKNLFLNHSENATAKDIAPTLTLYVGKKQLVEIEKVVLHPNYSQVDIGLIKLKQKVSVNERVMPICLPSKDYAEVGRVGYVSGWGRNANFKFTDHLKYVMLPVADQDQCIRHYEGSTVPEKKTPKSPVGVQPILNEHTFCAGMSKYQEDTCYGDAGSAFAVHDLEEDTWYATGILSFDKSCAVAEYGVYVKVTSIQDWVQKTIAEN

SEQ ID NO: 141 - protein, 307 aa, Homo sapiens
MSALGAVIALLLWGQLFAVDSGNDVTDIADDGCPKPPEIAHGYVEHSVRYQCKNYYKLRTEGDGVYTLNDKKQWINKAVGDKLPECEAGATLINEQWLLTTAKNLFLNHSENATAKDIAPTLTLYVGKKQLVEIEKVVLHPNYSQVDIGLIKLKQKVSVNERVMPICLPSKDYAEVGRVGYVSGWGRNANFKFTDHLKYVMLPVADQDQCIRHYEGSTVPEKKTPKSPVGVQPILNEHTFCAGMSKYQEDTCYGDAGSAFAVHDLEEDTWYATGILSFDKSCAVAEYGVYVKVTSIQDWVQKTIAEN

SEQ ID NO: 142 - protein, 34 aa, Homo sapiens
MSALGAVIALLLWGQLFAVDSGNDVTDIADGFPP

SEQ ID NO: 143 - protein, 92 aa, Homo sapiens
MSALGAVIALLLWGQLFAVDSGNDVTDIADDGCPKPPEIAHGYVEHSVRYQCKNYYKLRTEGDGVYTLNNEKQWINKAVGDKLPECEAAHTE

SEQ ID NO: 144 - protein, 146 aa, Homo sapiens
MSALGAVIALLLWGQLFAVDSGNDVTDIADDGCPKPPEIAHGYVEHSVRYQCKNYYKLRTEGDGVYTLNNEKQWINKAVGDKLPECEAVCGKPKNPANPVQRILGGHLDAKGSFPWQAKMVSHHNLTTVPLPFTTWRRTPGMRLGS

SEQ ID NO: 145 - protein, 91 aa, Homo sapiens
MSALGAVIALLLWGQLFAVDSGNDVTDIADDGCPKPPEIAHGYVEHSVRYQCKNYYKLRTEGDGVYTLNDKKQWINKAVGDKLPECEAGGC

SEQ ID NO: 146 - DNA, 1353 bp, Homo sapiens
tgaggaaaggagggggctggaagagagtaaagggctgttgttaaacagtttcttaccgtaagagggagttcagacctagatctttccagttaatcacacaacaaacttagctcatcgcaataaaaagcagctcagagccgactggctcttttaggcactgactccgaacaggattctttcacccaggcatctcctccagagggatccgccagcccgtccagcagcaccatgtgggtgaccaaactcctgccagccctgctgctgcagcatgtcctcctgcatctcctcctgctccccatcgccatcccctatgcagagggacaaaggaaaagaagaaatacaattcatgaattcaaaaaatcagcaaagactaccctaatcaaaatagatccagcactgaagataaaaaccaaaaaagtgaatactgcagaccaatgtgctaatagatgtactaggaataaaggacttccattcacttgcaaggcttttgtttttgataaagcaagaaaacaatgcctctggttccccttcaatagcatgtcaagtggagtgaaaaaagaatttggccatgaatttgacctctatgaaaacaaagactacattagaaactgcatcattggtaaaggacgcagctacaagggaacagtatctatcactaagagtggcatcaaatgtcagccctggagttccatgataccacacgaacacagctttttgccttcgagctatcggggtaaagacctacaggaaaactactgtcgaaatcctcgaggggaagaagggggaccctggtgtttcacaagcaatccagaggtacgctacgaagtctgtgacattcctcagtgttcagaagttgaatgcatgacctgcaatggggagagttatcgaggtctcatggatcatacagaatcaggcaagatttgtcagcgctgggatcatcagacaccacaccggcacaaattcttgcctgaaagatatcccgacaagggctttgatgataattattgccgcaatcccgatggccagccgaggccatggtgctatactcttgaccctcacacccgctgggagtactgtgcaattaaaacatgcgagacataacatgggctctcaactgatggtgaacttcttctggtgagtgacagaggctgcagtgaagaataatgagtctaatagaagtttatcacagatgtctctaatctctatagctgatccctacctctctcgctgtctttgtacccagcctgcattctgtttcgatctgtcttttagcagtccatacaatcatttttctacatgctggcccttacccagcttttctgaatttacaataaaaactattttttaacgtga

SEQ ID NO: 147 - DNA, 1286 bp, Homo sapiens
tgaggaaaggagggggctggaagagagtaaagggctgttgttaaacagtttcttaccgtaagagggagttcagacctagatctttccagttaatcacacaacaaacttagctcatcgcaataaaaagcagctcagagccgactggctcttttaggcactgactccgaacaggattctttcacccaggcatctcctccagagggatccgccagcccgtccagcagcaccatgtgggtgaccaaactcctgccagccctgctgctgcagcatgtcctcctgcatctcctcctgctccccatcgccatcccctatgcagagggacaaaggaaaagaagaaatacaattcatgaattcaaaaaatcagcaaagactaccctaatcaaaatagatccagcactgaagataaaaaccaaaaaagtgaatactgcagaccaatgtgctaatagatgtactaggaataaaggacttccattcacttgcaaggcttttgtttttgataaagcaagaaaacaatgcctctggttccccttcaatagcatgtcaagtggagtgaaaaaagaatttggccatgaatttgacctctatgaaaacaaagactacattagaaactgcatcattggtaaaggacgcagctacaagggaacagtatctatcactaagagtggcatcaaatgtcagccctggagttccatgataccacacgaacacagctttttgccttcgagctatcggggtaaagacctacaggaaaactactgtcgaaatcctcgaggggaagaagggggaccctggtgtttcacaagcaatccagaggtacgctacgaagtctgtgacattcctcagtgttcagaagttgaatgcatgacctgcaatggggagagttatcgaggtctcatggatcatacagaatcaggcaagatttgtcagcgctgggatcatcagacaccacaccggcacaaattcttgcctgaaagatatcccgacaagggctttgatgataattattgccgcaatcccgatggccagccgaggccatggtgctatactcttgaccctcacacccgctgggagtactgtgcaattaaaacatgcgcagaatgatggggaagttcctctgaacaaacctaactgaatattatccacgctatggtactgccgaggtaaatctctctcaatctagacctgctaataaaaggaaatgttttggacaactcttaatactttggacaacaataaataactgaagaatctggaagcctttcagagtaaaacactgtgttccaagg

SEQ ID NO: 148 - DNA, 1367 bp, Homo sapiens
tgaggaaaggagggggctggaagagagtaaagggctgttgttaaacagtttcttaccgtaagagggagttcagacctagatctttccagttaatcacacaacaaacttagctcatcgcaataaaaagcagctcagagccgactggctcttttaggcactgactccgaacaggattctttcacccaggcatctcctccagagggatccgccagcccgtccagcagcaccatgtgggtgaccaaactcctgccagccctgctgctgcagcatgtcctcctgcatctcctcctgctccccatcgccatcccctatgcagagggacaaaggaaaagaagaaatacaattcatgaattcaaaaaatcagcaaagactaccctaatcaaaatagatccagcactgaagataaaaaccaaaaaagtgaatactgcagaccaatgtgctaatagatgtactaggaataaaggacttccattcacttgcaaggcttttgtttttgataaagcaagaaaacaatgcctctggttccccttcaatagcatgtcaagtggagtgaaaaaagaatttggccatgaatttgacctctatgaaaacaaagactacattagaaactgcatcattggtaaaggacgcagctacaagggaacagtatctatcactaagagtggcatcaaatgtcagccctggagttccatgataccacacgaacacagctttttgccttcgagctatcggggtaaagacctacaggaaaactactgtcgaaatcctcgaggggaagaagggggaccctggtgtttcacaagcaatccagaggtacgctacgaagtctgtgacattcctcagtgttcagaagttgaatgcatgacctgcaatggggagagttatcgaggtctcatggatcatacagaatcaggcaagatttgtcagcgctgggatcatcagacaccacaccggcacaaattcttgcctgaaagatatcccgacaagggctttgatgataattattgccgcaatcccgatggccagccgaggccatggtgctatactcttgaccctcacacccgctgggagtactgtgcaattaaaacatgcgcagaatgatggggaagttcctctgaacaaacctaactgaatattatccacgctatggtactgccgaggtaaatctctctcaatctagacctgctaataaaaggaaatgttttggacaactcttaatactttggacaacaataaataactgaagaatctggaagcctttcagagtaaaacactgtgttccaaggaaattgaatcatgtgttttgtcctttaaaataaaagatgactcctgtgacagtgtttctctgcatagattgggttggttcc

SEQ ID NO: 149 - DNA, 2068 bp, Homo sapiens
tgaggaaaggagggggctggaagagagtaaagggctgttgttaaacagtttcttaccgtaagagggagttcagacctagatctttccagttaatcacacaacaaacttagctcatcgcaataaaaagcagctcagagccgactggctcttttaggcactgactccgaacaggattctttcacccaggcatctcctccagagggatccgccagcccgtccagcagcaccatgtgggtgaccaaactcctgccagccctgctgctgcagcatgtcctcctgcatctcctcctgctccccatcgccatcccctatgcagagggacaaaggaaaagaagaaatacaattcatgaattcaaaaaatcagcaaagactaccctaatcaaaatagatccagcactgaagataaaaaccaaaaaagtgaatactgcagaccaatgtgctaatagatgtactaggaataaaggacttccattcacttgcaaggcttttgtttttgataaagcaagaaaacaatgcctctggttccccttcaatagcatgtcaagtggagtgaaaaaagaatttggccatgaatttgacctctatgaaaacaaagactacattagaaactgcatcattggtaaaggacgcagctacaagggaacagtatctatcactaagagtggcatcaaatgtcagccctggagttccatgataccacacgaacacagctatcggggtaaagacctacaggaaaactactgtcgaaatcctcgaggggaagaagggggaccctggtgtttcacaagcaatccagaggtacgctacgaagtctgtgacattcctcagtgttcagaaggtaaataaacctgaatgccatgtgggccattctattccccctatgtgtagaactgtaactcacattaaaggttaacagcaacgaatcaatcataacaaatatgttgttcatgcaaatgcaactacaaataattatttaaacatttttatacaatgtttttaaaactgttggattatcaccagattaatgcaaaataacagagcgagttatcagtttgaatttcaacactgcctgagacatccctctggggaaagtgaaagagagggtttacttacctactgtcttgagctcacatacctcaaaatctactactgtgtggcacctgaaaggagttgaatgaagcttagcctttcattagcaatgttaattctattcaaccagcacctgcttccacagaaattctgtccaaactatcatgaagtggtgtgacaagggtatatggacccagaagataatacaatataagaagggatcactggaagcttgaccccatgcacattttggtgaaaatgtgcctagaatcaaatgtgacacgtaggctggaactgagtaccattcagaataggatctgaagagatcaaagcaatggagaccaccaaactgtcttgaaggcaggcaccttaagtccatgtctatgttttcagctcttctcacagcataaaagggcattgtccttacttttgcagtggaaaactgaatggctgacaagatggaagagtaaccatttcagcattgtatgtggtttcatttttcttagttatctggctactgaatagccggatttttcagttctgtcagaaactctaaatttccaaaaatctaagtgaaacatggatgaaactctgttagaaaattattaggattttggagtatttggggagggggactactggaatgctgtccaagttttatactaagatatcttacctgtttgttattaaccaaatatttttaaaaatatttcctccataaatattcatttaatattaggttgatatttatcacataaaaagtaaaggctactgttagctaattgtcacagagaaggatttgttttctgttgttagtgaatttgaaatccttgactttatgtgctacagccagttccatctctgtttgtaaattcttactttccattccatatcatattctgttccctataacctcttcattgttttcttttcttttaaaaataataaacttttctatgatcacgttttgaacaagtct

SEQ ID NO: 150 - DNA, 1221 bp, Homo sapiens
tgaggaaaggagggggctggaagagagtaaagggctgttgttaaacagtttcttaccgtaagagggagttcagacctagatctttccagttaatcacacaacaaacttagctcatcgcaataaaaagcagctcagagccgactggctcttttaggcactgactccgaacaggattctttcacccaggcatctcctccagagggatccgccagcccgtccagcagcaccatgtgggtgaccaaactcctgccagccctgctgctgcagcatgtcctcctgcatctcctcctgctccccatcgccatcccctatgcagagggacaaaggaaaagaagaaatacaattcatgaattcaaaaaatcagcaaagactaccctaatcaaaatagatccagcactgaagataaaaaccaaaaaagtgaatactgcagaccaatgtgctaatagatgtactaggaataaaggacttccattcacttgcaaggcttttgtttttgataaagcaagaaaacaatgcctctggttccccttcaatagcatgtcaagtggagtgaaaaaagaatttggccatgaatttgacctctatgaaaacaaagactacattagaaactgcatcattggtaaaggacgcagctacaagggaacagtatctatcactaagagtggcatcaaatgtcagccctggagttccatgataccacacgaacacaggtaagaacagtatgaagaaaagagatgaagcctctgtcttttttacatgttaacagtctcatattagtccttcagaataattctacaatcctaaaataacttagccaacttgctgaattgtattacggcaaggtttatatgaattcatgactgatatttagcaaatgattaattaatatgttaataaaatgtagccaaaacaatatcttaccttaatgcctcaatttgtagatctcggtatttgtgaaataataacgtaaacttcgtttaaaaggattcttcttcccctttctgtctttgagaaagtacggcactgtgcagggggagaggttgattgtgaaaaatcagaggtagatgagaatcttactgagggctgagggttctttaaccttggtggatctcaacattggttgcacattaaaatcacctgctgcaagcccttgacgaatcttacttagaagatgacaacacagaacaattaaatcagaatctctggggagaatagggcacc

SEQ ID NO: 151 - DNA, 171 bp, Artificial
  Synthetic oligonucleotide
tgaggaaaggagggggctggaagagagtaaagggctgttgttaaacagtttcttaccgtaagagggagttcagacctagatctttccagttaatcacacaacaaacttagctcatcgcaataaaaagcagctcagagccgactggctcttttaggcactgactccgaacag

SEQ ID NO: 152 - DNA, 145 bp, Artificial
  Synthetic oligonucleotide
gattctttcacccaggcatctcctccagagggatccgccagcccgtccagcagcaccatgtgggtgaccaaactcctgccagccctgctgctgcagcatgtcctcctgcatctcctcctgctccccatcgccatcccctatgcag

SEQ ID NO: 153 - DNA, 166 bp, Artificial
  Synthetic oligonucleotide
agggacaaaggaaaagaagaaatacaattcatgaattcaaaaaatcagcaaagactaccctaatcaaaatagatccagcactgaagataaaaaccaaaaaagtgaatactgcagaccaatgtgctaatagatgtactaggaataaaggacttccattcacttgcaa

SEQ ID NO: 154 - DNA, 511 bp, Artificial
  Synthetic oligonucleotide
gtaagaacagtatgaagaaaagagatgaagcctctgtcttttttacatgttaacagtctcatattagtccttcagaataattctacaatcctaaaataacttagccaacttgctgaattgtattacggcaaggtttatatgaattcatgactgatatttagcaaatgattaattaatatgttaataaaatgtagccaaaacaatatcttaccttaatgcctcaatttgtagatctcggtatttgtgaaataataacgtaaacttcgtttaaaaggattcttcttcccctttctgtctttgagaaagtacggcactgtgcagggggagaggttgattgtgaaaaatcagaggtagatgagaatcttactgagggctgagggttctttaaccttggtggatctcaacattggttgcacattaaaatcacctgctgcaagcccttgacgaatcttacttagaagatgacaacacagaacaattaaatcagaatctctggggagaatagggcacc

SEQ ID NO: 155 - DNA, 128 bp, Artificial
  Synthetic oligonucleotide
ctatcggggtaaagacctacaggaaaactactgtcgaaatcctcgaggggaagaagggggaccctggtgtttcacaagcaatccagaggtacgctacgaagtctgtgacattcctcagtgttcagaag

SEQ ID NO: 156 - DNA, 1230 bp, Artificial
  Synthetic oligonucleotide
gtaaataaacctgaatgccatgtgggccattctattccccctatgtgtagaactgtaactcacattaaaggttaacagcaacgaatcaatcataacaaatatgttgttcatgcaaatgcaactacaaataattatttaaacatttttatacaatgtttttaaaactgttggattatcaccagattaatgcaaaataacagagcgagttatcagtttgaatttcaacactgcctgagacatccctctggggaaagtgaaagagagggtttacttacctactgtcttgagctcacatacctcaaaatctactactgtgtggcacctgaaaggagttgaatgaagcttagcctttcattagcaatgttaattctattcaaccagcacctgcttccacagaaattctgtccaaactatcatgaagtggtgtgacaagggtatatggacccagaagataatacaatataagaagggatcactggaagcttgaccccatgcacattttggtgaaaatgtgcctagaatcaaatgtgacacgtaggctggaactgagtaccattcagaataggatctgaagagatcaaagcaatggagaccaccaaactgtcttgaaggcaggcaccttaagtccatgtctatgttttcagctcttctcacagcataaaagggcattgtccttacttttgcagtggaaaactgaatggctgacaagatggaagagtaaccatttcagcattgtatgtggtttcatttttcttagttatctggctactgaatagccggatttttcagttctgtcagaaactctaaatttccaaaaatctaagtgaaacatggatgaaactctgttagaaaattattaggattttggagtatttggggagggggactactggaatgctgtccaagttttatactaagatatcttacctgtttgttattaaccaaatatttttaaaaatatttcctccataaatattcatttaatattaggttgatatttatcacataaaaagtaaaggctactgttagctaattgtcacagagaaggatttgttttctgttgttagtgaatttgaaatccttgactttatgtgctacagccagttccatctctgtttgtaaattcttactttccattccatatcatattctgttccctataacctcttcattgttttcttttcttttaaaaataataaacttttctatgatcacgttttgaacaagtct

SEQ ID NO: 157 - DNA, 121 bp, Artificial
  Synthetic oligonucleotide
ttgaatgcatgacctgcaatggggagagttatcgaggtctcatggatcatacagaatcaggcaagatttgtcagcgctgggatcatcagacaccacaccggcacaaattcttgcctgaaag

SEQ ID NO: 158 - DNA, 260 bp, Artificial
  Synthetic oligonucleotide
agacataacatgggctctcaactgatggtgaacttcttctggtgagtgacagaggctgcagtgaagaataatgagtctaatagaagtttatcacagatgtctctaatctctatagctgatccctacctctctcgctgtctttgtacccagcctgcattctgtttcgatctgtcttttagcagtccatacaatcatttttctacatgctggcccttacccagcttttctgaatttacaataaaaactattttttaacgtga

SEQ ID NO: 159 - DNA, 274 bp, Artificial
  Synthetic oligonucleotide
cagaatgatggggaagttcctctgaacaaacctaactgaatattatccacgctatggtactgccgaggtaaatctctctcaatctagacctgctaataaaaggaaatgttttggacaactcttaatactttggacaacaataaataactgaagaatctggaagcctttcagagtaaaacactgtgttccaaggaaattgaatcatgtgttttgtcctttaaaataaaagatgactcctgtgacagtgtttctctgcatagattgggttggttcc

SEQ ID NO: 160 - DNA, 113 bp, Artificial
  Synthetic oligonucleotide
ggcttttgtttttgataaagcaagaaaacaatgcctctggttccccttcaatagcatgtcaagtggagtgaaaaaagaatttggccatgaatttgacctctatgaaaacaaag

SEQ ID NO: 161 - DNA, 115 bp, Artificial
  Synthetic oligonucleotide
actacattagaaactgcatcattggtaaaggacgcagctacaagggaacagtatctatcactaagagtggcatcaaatgtcagccctggagttccatgataccacacgaacacag

SEQ ID NO: 162 - DNA, 15 bp, Artificial
  Synthetic oligonucleotide
ctttttgccttcgag

SEQ ID NO: 163 - DNA, 119 bp, Artificial
  Synthetic oligonucleotide
atatcccgacaagggctttgatgataattattgccgcaatcccgatggccagccgaggccatggtgctatactcttgaccctcacacccgctgggagtactgtgcaattaaaacatgcg

SEQ ID NO: 164 - protein, 728 aa, Homo sapiens
MWVTKLLPALLLQHVLLHLLLLPIAIPYAEGQRKRRNTIHEFKKSAKTTLIKIDPALKIKTKKVNTADQCANRCTRNKGLPFTCKAFVFDKARKQCLWFPFNSMSSGVKKEFGHEFDLYENKDYIRNCIIGKGRSYKGTVSITKSGIKCQPWSSMIPHEHSFLPSSYRGKDLQENYCRNPRGEEGGPWCFTSNPEVRYEVCDIPQCSEVECMTCNGESYRGLMDHTESGKICQRWDHQTPHRHKFLPERYPDKGFDDNYCRNPDGQPRPWCYTLDPHTRWEYCAIKTCADNTMNDTDVPLETTECIQGQGEGYRGTVNTIWNGIPCQRWDSQYPHEHDMTPENFKCKDLRENYCRNPDGSESPWCFTTDPNIRVGYCSQIPNCDMSHGQDCYRGNGKNYMGNLSQTRSGLTCSMWDKNMEDLHRHIFWEPDASKLNENYCRNPDDDAHGPWCYTGNPLIPWDYCPISRCEGDTTPTIVNLDHPVISCAKTKQLRVVNGIPTRTNIGWMVSLRYRNKHICGGSLIKESWVLTARQCFPSRDLKDYEAWLGIHDVHGRGDEKCKQVLNVSQLVYGPEGSDLVLMKLARPAVLDDFVSTIDLPNYGCTIPEKTSCSVYGWGYTGLINYDGLLRVAHLYIMGNEKCSQHHRGKVTLNESEICAGAEKIGSGPCEGDYGGPLVCEQHKMRMVLGVIVPGRGCAIPNRPGIFVRVAYYAKWIHKIILTYKVPQS

SEQ ID NO: 165 - protein, 290 aa, Homo sapiens
MWVTKLLPALLLQHVLLHLLLLPIAIPYAEGQRKRRNTIHEFKKSAKTTLIKIDPALKIKTKKVNTADQCANRCTRNKGLPFTCKAFVFDKARKQCLWFPFNSMSSGVKKEFGHEFDLYENKDYIRNCIIGKGRSYKGTVSITKSGIKCQPWSSMIPHEHSFLPSSYRGKDLQENYCRNPRGEEGGPWCFTSNPEVRYEVCDIPQCSEVECMTCNGESYRGLMDHTESGKICQRWDHQTPHRHKFLPERYPDKGFDDNYCRNPDGQPRPWCYTLDPHTRWEYCAIKTCAE

SEQ ID NO: 166 - protein, 205 aa, Homo sapiens
MWVTKLLPALLLQHVLLHLLLLPIAIPYAEGQRKRRNTIHEFKKSAKTTLIKIDPALKIKTKKVNTADQCANRCTRNKGLPFTCKAFVFDKARKQCLWFPFNSMSSGVKKEFGHEFDLYENKDYIRNCIIGKGRSYKGTVSITKSGIKCQPWSSMIPHEHSYRGKDLQENYCRNPRGEEGGPWCFTSNPEVRYEVCDIPQCSEGK

SEQ ID NO: 167 - protein, 161 aa, Homo sapiens
MWVTKLLPALLLQHVLLHLLLLPIAIPYAEGQRKRRNTIHEFKKSAKTTLIKIDPALKIKTKKVNTADQCANRCTRNKGLPFTCKAFVFDKARKQCLWFPFNSMSSGVKKEFGHEFDLYENKDYIRNCIIGKGRSYKGTVSITKSGIKCQPWSSMIPHEHR

SEQ ID NO: 168 - protein, 296 aa, Homo sapiens
MWVTKLLPALLLQHVLLHLLLLPIAIPYAEGQRKRRNTIHEFKKSAKTTLIKIDPALKIKTKKVNTADQCANRCTRNKGLPFTCKAFVFDKARKQCLWFPFNSMSSGVKKEFGHEFDLYENKDYIRNCIIGKGRSYKGTVSITKSGIKCQPWSSMIPHEHSFLPSSYRGKDLQENYCRNPRGEEGGPWCFTSNPEVRYEVCDIPQCSEVECMTCNGESYRGLMDHTESGKICQRWDHQTPHRHKFLPERYPDKGFDDNYCRNPDGQPRPWCYTLDPHTRWEYCAIKNMRDITWALN

SEQ ID NO: 169 - DNA, 1696 bp, Homo sapiens
gtaacaccatgtttggtaaataagtgttttggtgttgtgcaagggtctggtttcagcctgaagccatctcagagctgtctgggtctctggagactggagggacaacctagtctagagcccatttgcatgagaccaaggatcctcctgcaagagacaccatcctgagggaagagggcttctgaaccagcttgacccaataagaaattcttgggtgccgacgcggaagcagattcagagcctagagccgtgcctgcgtccgtagtttccttctagcttcttttgatttcaaatcaagacttacagggagagggagcgataaacacaaactctgcaagatgccacaaggtcctcctttgacatccccaacaaagaggactggagatgtctgaggctcattctgccctcgagcccaccgggaacgaaagagaagctctatctcccctccaggagcccagctatgaactccttctccacaagtaagtgcaggaaatccttagccctggaactgccagcggcggtcgagccctgtgtgagggaggggtgtgtggcccagggagggctggcgggcggccagcagcagaggcaggctcccagctgtgctgtcagctcacccctgcgctcgctcccctccggcacaggcgccttcggtccagttgccttctccctggggctgctcctggtgttgcctgctgccttccctgccccagtacccccaggagaagattccaaagatgtagccgccccacacagacagccactcacctcttcagaacgaattgacaaacaaattcggtacatcctcgacggcatctcagccctgagaaaggagacatgtaacaagagtaacatgtgtgaaagcagcaaagaggcactggcagaaaacaacctgaaccttccaaagatggctgaaaaagatggatgcttccaatctggattcaatgaggagacttgcctggtgaaaatcatcactggtcttttggagtttgaggtatacctagagtacctccagaacagatttgagagtagtgaggaacaagccagagctgtgcagatgagtacaaaagtcctgatccagttcctgcagaaaaaggcaaagaatctagatgcaataaccacccctgacccaaccacaaatgccagcctgctgacgaagctgcaggcacagaaccagtggctgcaggacatgacaactcatctcattctgcgcagctttaaggagttcctgcagtccagcctgagggctcttcggcaaatgtagcatgggcacctcagattgttgttgttaatgggcattccttcttctggtcagaaacctgtccactgggcacagaacttatgttgttctctatggagaactaaaagtatgagcgttaggacactattttaattatttttaatttattaatatttaaatatgtgaagctgagttaatttatgtaagtcatatttatatttttaagaagtaccacttgaaacattttatgtattagttttgaaataataatggaaagtggctatgcagtttgaatatcctttgtttcagagccagatcatttcttggaaagtgtaggcttacctcaaataaatggctaacttatacatatttttaaagaaatatttatattgtatttatataatgtataaatggtttttataccaataaatggcattttaaaaaattcagcaaataagagtg

SEQ ID NO: 170 - DNA, 3279 bp, Homo sapiens
gtaacaccatgtttggtaaataagtgttttggtgttgtgcaagggtctggtttcagcctgaagccatctcagagctgtctgggtctctggagactggagggacaacctagtctagagcccatttgcatgagaccaaggatcctcctgcaagagacaccatcctgagggaagagggcttctgaaccagcttgacccaataagaaattcttgggtgccgacgcggaagcagattcagagcctagagccgtgcctgcgtccgtagtttccttctagcttcttttgatttcaaatcaagacttacagggagagggagcgataaacacaaactctgcaagatgccacaaggtcctcctttgacatccccaacaaagaggactggagatgtctgaggctcattctgccctcgagcccaccgggaacgaaagagaagctctatctcccctccaggagcccagctatgaactccttctccacaagcgccttcggtccagttgccttctccctggggctgctcctggtgttgcctgctgccttccctgccccagtacccccaggagaagattccaaagatgtagccgccccacacagacagccactcacctcttcagaacgaattgacaaacaaattcggtacatcctcgacggcatctcagccctgagaaaggagacatgtaacaagagtaacatgtgtgaaagcagcaaagaggcactggcagaaaacaacctgaaccttccaaagatggctgaaaaagatggatgcttccaatctggattcaatgaggagacttgcctggtgaaaatcatcactggtcttttggagtttgaggtatacctagagtacctccagaacagatttgagagtagtgaggaacaagccagagctgtgcagatgagtacaaaagtcctgatccagttcctgcagaaaaaggtgggtgtgtcctcattccctcaacttggtgtgggggaagacaggctcaaagacagtgtcctggacaactcagggatgcaatgccacttccaaaagagaaggctacacgtaaacaaaagagtctgagaaatagtttctgattgttattgttaaatctttttttgtttgtttggttggttggctctcttctgcaaaggacatcaataactgtattttaaactatatattaactgaggtggattttaacatcaatttttaatagtgcaagagatttaaaaccaaaggcgggggggcgggcagaaaaaagtgcatccaactccagccagtgatccacagaaacaaagaccaaggagcacaaaatgattttaagattttagtcattgccaagtgacattcttctcactgtggttgtttcaattctttttcctaccttttaccagagagttagttcagagaaatggtcagagactcaagggtggaaagaggtaccaaaggctttggccaccagtagctggctattcagacagcagggagtagacttgctggctagcatgtggaggagccaaagctcaataagaaggggcctagaatgaaacccttggtgctgatcctgcctctgccatttctacttaagccagggtttctcatatgttaacatgcatgggaattccctgggcatcttcttgtggtgtggagtctgacttagcaagcctcgggtgggtttgagggtcaaatttctaccaggcttatatccctggtgatgctgcagaattccaggaccacacttggaggtttaaggccttccacaagttacttatcccatatggtgggtctatggaaaggtgtttcccagtcctctttacaccaccagatcagtggtctttcaacagatcctaaagggatggtgagagggaaactggagaaaagtatcagatttagaggccactgaagaacccatattaaaatgcctttaagtatgggctcttcattcatatactaaatatgaactatgtgccaggcattatttcatatgacagaatacaaacaaataagatagtgatgctggtcaggcttggtggctcatgcctgtattccctaaactttgggagcctaaggtgagaactccttgaactcctaaggccaggagttcaagaccagcctggataacatagcaagaccccatctctacaaaaaaccaaaaccaaacaaacaaaaatgatagtggtgcttccctcaggatgcttgtggtctaatgggagacagaacagcaaagggatgattagaagttggttgctgtgagccaggcacagtgctgatataatcccagcgctatgggaggctgaggtgggtggatcatttgaggccaggagtttaagaccagcctggtcaacatggtaaaaccccatctctacttaaaaatacaaaaaagttagccaggcatggtggcatacacctgtaacccagctactcaggaggctgaggcacatgaatcacttgaacccaggaggcagaggttgctgtgcaccactgcactccagcctgggtgacagaacgagaccttgactcaaaaaaaaaaaaaagaagtttgttgctatggaagggtcctactcagagcaggcaccccagttaatctcattcaccccacatttcacatttgaacatcatcccatagcccagagcatccctccactgcaaaggatttattcaacatttaaacaatcctttttactttcattttccttcaggcaaagaatctagatgcaataaccacccctgacccaaccacaaatgccagcctgctgacgaagctgcaggcacagaaccagtggctgcaggacatgacaactcatctcattctgcgcagctttaaggagttcctgcagtccagcctgagggctcttcggcaaatgtagcatgggcacctcagattgttgttgttaatgggcattccttcttctggtcagaaacctgtccactgggcacagaacttatgttgttctctatggagaactaaaagtatgagcgttaggacactattttaattatttttaatttattaatatttaaatatgtgaagctgagttaatttatgtaagtcatatttatatttttaagaagtaccacttgaaacattttatgtattagttttgaaataataatggaaagtggctatgcagtttgaatatcctttgtttcagagccagatcatttcttggaaagtgtaggcttacctcaaataaatggctaacttatacatatttttaaagaaatatttatattgtatttatataatgtataaatggtttttataccaataaatggcattttaaaaaattcagcaaataagagtg

SEQ ID NO: 171 - DNA, 1042 bp, Homo sapiens
ttagagtctcaacccccaataaatataggactggagatgtctgaggctcattctgccctcgagcccaccgggaacgaaagagaagctctatctcccctccaggagcccagctatgaactccttctccacaagcgccttcggtccagttgccttctccctggggctgctcctggtgttgcctgctgccttccctgccccagtacccccaggagaagattccaaagatgtagccgccccacacagacagccactcacctcttcagaacgaattgacaaacaaattcggtacatcctcgacggcatctcagccctgagaaaggagacatgtaacaagagtaacatgtgtgaaagcagcaaagaggcactggcagaaaacaacctgaaccttccaaagatggctgaaaaagatggatgcttccaatctggattcaatgaggcaaagaatctagatgcaataaccacccctgacccaaccacaaatgccagcctgctgacgaagctgcaggcacagaaccagtggctgcaggacatgacaactcatctcattctgcgcagctttaaggagttcctgcagtccagcctgagggctcttcggcaaatgtagcatgggcacctcagattgttgttgttaatgggcattccttcttctggtcagaaacctgtccactgggcacagaacttatgttgttctctatggagaactaaaagtatgagcgttaggacactattttaattatttttaatttattaatatttaaatatgtgaagctgagttaatttatgtaagtcatatttatatttttaagaagtaccacttgaaacattttatgtattagttttgaaataataatggaaagtggctatgcagtttgaatatcctttgtttcagagccagatcatttcttggaaagtgtaggcttacctcaaataaatggctaacttatacatatttttaaagaaatatttatattgtatttatataatgtataaatggtttttataccaataaatggcattttaaaaaattcagcaaataagagtg

SEQ ID NO: 172 - DNA, 1482 bp, Homo sapiens
gtaacaccatgtttggtaaataagtgttttggtgttgtgcaagggtctggtttcagcctgaagccatctcagagctgtctgggtctctggagactggagggacaacctagtctagagcccatttgcatgagaccaaggatcctcctgcaagagacaccatcctgagggaagagggcttctgaaccagcttgacccaataagaaattcttgggtgccgacgcggaagcagattcagagcctagagccgtgcctgcgtccgtagtttccttctagcttcttttgatttcaaatcaagacttacagggagagggagcgataaacacaaactctgcaagatgccacaaggtcctcctttgacatccccaacaaagaggactggagatgtctgaggctcattctgccctcgagcccaccgggaacgaaagagaagctctatctcccctccaggagcccagctatgaactccttctccacaagcgccttcggtccagttgccttctccctggggctgctcctggtgttgcctgctgccttccctgccccagtacccccaggagaagattccaaagatgtagccgccccacacagacagccactcacctcttcagaacgaattgacaaacaaattcggtacatcctcgacggcatctcagccctgagaaaggagacatgtaacaagagtaacatatggctgaaaaagatggatgcttccaatctggattcaatgaggagacttgcctggtgaaaatcatcactggtcttttggagtttgaggtatacctagagtacctccagaacagatttgagagtagtgaggaacaagccagagctgtgcagatgagtacaaaagtcctgatccagttcctgcagaaaaaggcaaagaatctagatgcaataaccacccctgacccaaccacaaatgccagcctgctgacgaagctgcaggcacagaaccagtggctgcaggacatgacaactcatctcattctgcgcagctttaaggagttcctgcagtccagcctgagggctcttcggcaaatgtagcatgggcacctcagattgttgttgttaatgggcattccttcttctggtcagaaacctgtccactgggcacagaacttatgttgttctctatggagaactaaaagtatgagcgttaggacactattttaattatttttaatttattaatatttaaatatgtgaagctgagttaatttatgtaagtcatatttatatttttaagaagtaccacttgaaacattttatgtattagttttgaaataataatggaaagtggctatgcagtttgaatatcctttgtttcagagccagatcatttcttggaaagtgtaggcttacctcaaataaatggctaacttatacatatttttaaagaaatatttatattgtatttatataatgtataaatggtttttataccaataaatggcattttaaaaaattcagcaaataagagtg

SEQ ID NO: 173 - DNA, 373 bp, Artificial
  Synthetic oligonucleotide
gtaacaccatgtttggtaaataagtgttttggtgttgtgcaagggtctggtttcagcctgaagccatctcagagctgtctgggtctctggagactggagggacaacctagtctagagcccatttgcatgagaccaaggatcctcctgcaagagacaccatcctgagggaagagggcttctgaaccagcttgacccaataagaaattcttgggtgccgacgcggaagcagattcagagcctagagccgtgcctgcgtccgtagtttccttctagcttcttttgatttcaaatcaagacttacagggagagggagcgataaacacaaactctgcaagatgccacaaggtcctcctttgacatccccaacaaagag

SEQ ID NO: 174 - DNA, 156 bp, Artificial
  Synthetic oligonucleotide
gtaagtgcaggaaatccttagccctggaactgccagcggcggtcgagccctgtgtgagggaggggtgtgtggcccagggagggctggcgggcggccagcagcagaggcaggctcccagctgtgctgtcagctcacccctgcgctcgctcccctccg

SEQ ID NO: 175 - DNA, 122 bp, Artificial
  Synthetic oligonucleotide
tacccccaggagaagattccaaagatgtagccgccccacacagacagccactcacctcttcagaacgaattgacaaacaaattcggtacatcctcgacggcatctcagccctgagaaaggag

SEQ ID NO: 176 - DNA, 1745 bp, Artificial
  Synthetic oligonucleotide
gtgggtgtgtcctcattccctcaacttggtgtgggggaagacaggctcaaagacagtgtcctggacaactcagggatgcaatgccacttccaaaagagaaggctacacgtaaacaaaagagtctgagaaatagtttctgattgttattgttaaatctttttttgtttgtttggttggttggctctcttctgcaaaggacatcaataactgtattttaaactatatattaactgaggtggattttaacatcaatttttaatagtgcaagagatttaaaaccaaaggcgggggggcgggcagaaaaaagtgcatccaactccagccagtgatccacagaaacaaagaccaaggagcacaaaatgattttaagattttagtcattgccaagtgacattcttctcactgtggttgtttcaattctttttcctaccttttaccagagagttagttcagagaaatggtcagagactcaagggtggaaagaggtaccaaaggctttggccaccagtagctggctattcagacagcagggagtagacttgctggctagcatgtggaggagccaaagctcaataagaaggggcctagaatgaaacccttggtgctgatcctgcctctgccatttctacttaagccagggtttctcatatgttaacatgcatgggaattccctgggcatcttcttgtggtgtggagtctgacttagcaagcctcgggtgggtttgagggtcaaatttctaccaggcttatatccctggtgatgctgcagaattccaggaccacacttggaggtttaaggccttccacaagttacttatcccatatggtgggtctatggaaaggtgtttcccagtcctctttacaccaccagatcagtggtctttcaacagatcctaaagggatggtgagagggaaactggagaaaagtatcagatttagaggccactgaagaacccatattaaaatgcctttaagtatgggctcttcattcatatactaaatatgaactatgtgccaggcattatttcatatgacagaatacaaacaaataagatagtgatgctggtcaggcttggtggctcatgcctgtattccctaaactttgggagcctaaggtgagaactccttgaactcctaaggccaggagttcaagaccagcctggataacatagcaagaccccatctctacaaaaaaccaaaaccaaacaaacaaaaatgatagtggtgcttccctcaggatgcttgtggtctaatgggagacagaacagcaaagggatgattagaagttggttgctgtgagccaggcacagtgctgatataatcccagcgctatgggaggctgaggtgggtggatcatttgaggccaggagtttaagaccagcctggtcaacatggtaaaaccccatctctacttaaaaatacaaaaaagttagccaggcatggtggcatacacctgtaacccagctactcaggaggctgaggcacatgaatcacttgaacccaggaggcagaggttgctgtgcaccactgcactccagcctgggtgacagaacgagaccttgactcaaaaaaaaaaaaaagaagtttgttgctatggaagggtcctactcagagcaggcaccccagttaatctcattcaccccacatttcacatttgaacatcatcccatagcccagagcatccctccactgcaaaggatttattcaacatttaaacaatcctttttactttcattttccttcag

SEQ ID NO: 177 - DNA, 457 bp, Artificial
  Synthetic oligonucleotide
cagtggctgcaggacatgacaactcatctcattctgcgcagctttaaggagttcctgcagtccagcctgagggctcttcggcaaatgtagcatgggcacctcagattgttgttgttaatgggcattccttcttctggtcagaaacctgtccactgggcacagaacttatgttgttctctatggagaactaaaagtatgagcgttaggacactattttaattatttttaatttattaatatttaaatatgtgaagctgagttaatttatgtaagtcatatttatatttttaagaagtaccacttgaaacattttatgtattagttttgaaataataatggaaagtggctatgcagtttgaatatcctttgtttcagagccagatcatttcttggaaagtgtaggcttacctcaaataaatggctaacttatacatatttttaaagaaatatttatatt

SEQ ID NO: 178 - DNA, 28 bp, Artificial
  Synthetic oligonucleotide
ttagagtctcaacccccaataaatatag

SEQ ID NO: 179 - DNA, 103 bp, Artificial
  Synthetic oligonucleotide
gactggagatgtctgaggctcattctgccctcgagcccaccgggaacgaaagagaagctctatctcccctccaggagcccagctatgaactccttctccacaa

SEQ ID NO: 180 - DNA, 6 bp, Artificial
  Synthetic oligonucleotide
gcacag

SEQ ID NO: 181 - DNA, 19 bp, Artificial
  Synthetic oligonucleotide
gcgccttcggtccagttgc

SEQ ID NO: 182 - DNA, 36 bp, Artificial
  Synthetic oligonucleotide
cttctccctggggctgctcctggtgttgcctgctgc

SEQ ID NO: 183 - DNA, 14 bp, Artificial
  Synthetic oligonucleotide
cttccctgccccag

SEQ ID NO: 184 - DNA, 20 bp, Artificial
  Synthetic oligonucleotide
acatgtaacaagagtaacat

SEQ ID NO: 185 - DNA, 52 bp, Artificial
  Synthetic oligonucleotide
gtgtgaaagcagcaaagaggcactggcagaaaacaacctgaaccttccaaag

SEQ ID NO: 186 - DNA, 42 bp, Artificial
  Synthetic oligonucleotide
atggctgaaaaagatggatgcttccaatctggattcaatgag

SEQ ID NO: 187 - DNA, 108 bp, Artificial
  Synthetic oligonucleotide
gagacttgcctggtgaaaatcatcactggtcttttggagtttgaggtatacctagagtacctccagaacagatttgagagtagtgaggaacaagccagagctgtgcag

SEQ ID NO: 188 - DNA, 39 bp, Artificial
  Synthetic oligonucleotide
atgagtacaaaagtcctgatccagttcctgcagaaaaag

SEQ ID NO: 189 - DNA, 34 bp, Artificial
  Synthetic oligonucleotide
gcaaagaatctagatgcaataaccacccctgacc

SEQ ID NO: 190 - DNA, 44 bp, Artificial
  Synthetic oligonucleotide
caaccacaaatgccagcctgctgacgaagctgcaggcacagaac

SEQ ID NO: 191 - DNA, 13 bp, Artificial
  Synthetic oligonucleotide
gtatttatataat

SEQ ID NO: 192 - DNA, 58 bp, Artificial
  Synthetic oligonucleotide
gtataaatggtttttataccaataaatggcattttaaaaaattcagcaaataagagtg

SEQ ID NO: 193 - protein, 212 aa, Homo sapiens
MNSFSTSAFGPVAFSLGLLLVLPAAFPAPVPPGEDSKDVAAPHRQPLTSSERIDKQIRYILDGISALRKETCNKSNMCESSKEALAENNLNLPKMAEKDGCFQSGFNEETCLVKIITGLLEFEVYLEYLQNRFESSEEQARAVQMSTKVLIQFLQKKAKNLDAITTPDPTTNASLLTKLQAQNQWLQDMTTHLILRSFKEFLQSSLRALRQM

SEQ ID NO: 194 - protein, 266 aa, Homo sapiens
MNSFSTSKCRKSLALELPAAVEPCVREGCVAQGGLAGGQQQRQAPSCAVSSPLRSLPSGTGAFGPVAFSLGLLLVLPAAFPAPVPPGEDSKDVAAPHRQPLTSSERIDKQIRYILDGISALRKETCNKSNMCESSKEALAENNLNLPKMAEKDGCFQSGFNEETCLVKIITGLLEFEVYLEYLQNRFESSEEQARAVQMSTKVLIQFLQKKAKNLDAITTPDPTTNASLLTKLQAQNQWLQDMTTHLILRSFKEFLQSSLRALRQM

SEQ ID NO: 195 - protein, 198 aa, Homo sapiens
MNSFSTSAFGPVAFSLGLLLVLPAAFPAPVPPGEDSKDVAAPHRQPLTSSERIDKQIRYILDGISALRKETCNKSNMCESSKEALAENNLNLPKMAEKDGCFQSGFNEETCLVKIITGLLEFEVYLEYLQNRFESSEEQARAVQMSTKVLIQFLQKKVGVSSFPQLGVGEDRLKDSVLDNSGMQCHFQKRRLHVNKRV

SEQ ID NO: 196 - protein, 163 aa, Homo sapiens
MNSFSTSAFGPVAFSLGLLLVLPAAFPAPVPPGEDSKDVAAPHRQPLTSSERIDKQIRYILDGISALRKETCNKSNMCESSKEALAENNLNLPKMAEKDGCFQSGFNEAKNLDAITTPDPTTNASLLTKLQAQNQWLQDMTTHLILRSFKEFLQSSLRALRQM

SEQ ID NO: 197 - protein, 95 aa, Homo sapiens [sequence omitted]

SEQ ID NO: 198 - DNA, 7935 bp, Homo sapiens
acgtatctgccacttagtgcagcattcagttgctgctttcaaacacttcaccactacgactttccctagtcaagtaagtggctccaggagttaaagatacacccttgtcaggcacctgattctgctgttcctgagatgccaacacatgcaggccaccttgctttcaaagaaatgacgtcactgtgcatacatactatgtgatctagcagctggagtttttgtctccttacttaggggatcataaaagaggctgtggagcgttatctctgcattaattacaagttaagaaaattgtttccaaatgcacttttcatgctgtgtatgctgaacacttcagaagtggagctcttaataagttgttacttttttctgtacttgaagcaggaagtggtttgagggagctgcgtggtctttcacatgtaattcagtgggtaaaggtgtcctgcccagaggcagagctcaccagctgattgtactctgactctcaaggtatttccaagtgagtgagtcgggggaagggagtaagggagtggactggagcttgggtcactatctgggctgctacaataggcatacaatggaaataggtggcttgactggggggaaaagattgacttaaatcccagctgtgcaatttgttcattgtttcaatggacaaaaggcagtttacccaggctcataatagcatacctgcctgggtgtccaaatgtaactagatgctttcacaaaccccacccacaaagcagcacatgtttttaagacttcagttttctattcacatcggcctcataatacccaccctgacctgctgtaaaagacctggaacaaacaaaaatgattacacctacagtgaagatgcacaccatgtcctcctcgcatctcttctacctggcgctgtgcctgctcaccttcaccagctctgccacggctggaccggagacgctctgcggggctgagctggtggatgctcttcagttcgtgtgtggagacaggggcttttatttcaacaagcccacagggtatggctccagcagtcggagggcgcctcagacaggcatcgtggatgagtgctgcttccggagctgtgatctaaggaggctggagatgtattgcgcacccctcaagcctgccaagtcagctcgctctgtccgtgcccagcgccacaccgacatgcccaagacccagaagtatcagcccccatctaccaacaagaacacgaagtctcagagaaggaaaggaagtacatttgaagaacgcaagtagagggagtgcaggaaacaagaactacaggatgtaggaagaccctcctgaggagtgaagagtgacatgccaccgcaggatcctttgctctgcacgagttacctgttaaactttggaacacctaccaaaaaataagtttgataacatttaaaagatgggcgtttcccccaatgaaatacacaagtaaacattccaacattgtctttaggagtgatttgcaccttgcaaaaatggtcctggagttggtagattgctgttgatcttttatcaataatgttctatagaaaagaaaaaaaaaatatatatatatatatatcttagtccctgcctctcaagagccacaaatgcatgggtgttgtatagatccagttgcactaaattcctctctgaatcttggctgctggagccattcattcagcaaccttgtctaagtggtttatgaattgtttccttatttgcacttctttctacacaactcgggctgtttgttttacagtgtctgataatcttgttagtctatacccaccacctcccttcataacctttatatttgccgaatttggcctcctcaaaagcagcagcaagtcgtcaagaagcacaccaattctaacccacaagattccatctgtggcatttgtaccaaatataagttggatgcattttattttagacacaaagctttatttttccacatcatgcttacaaaaaagaataatgcaaatagttgcaactttgaggccaatcatttttaggcatatgttttaaacatagaaagtttcttcaactcaaaagagttccttcaaatgatgagttaatgtgcaacctaattagtaactttcctctttttattttttccatatagagcactatgtaaatttagcatatcaattatacaggatatatcaaacagtatgtaaaactctgttttttagtataatggtgctattttgtagtttgttatatgaaagagtctggccaaaacggtaatacgtgaaagcaaaacaataggggaagcctggagccaaagatgacacaaggggaagggtactgaaaacaccatccatttgggaaagaaggcaaagtccccccagttatgccttccaagaggaacttcagacacaaaagtccactgatgcaaattggactggcgagtccagagaggaaactgtggaatggaaaaagcagaaggctaggaattttagcagtcctggtttctttttctcatggaagaaatgaacatctgccagctgtgtcatggactcaccactgtgtgaccttgggcaagtcacttcacctctctgtgcctcagtttcctcatctgcaaaatgggggcaatatgtcatctacctacctcaaaggggtggtataaggtttaaaaagataaagattcagattttttttaccctgggttgctgtaagggtgcaacatcagggcgcttgagttgctgagatgcaaggaattctataaataacccattcatagcatagctagagattggtgaattgaatgctcctgacatctcagttcttgtcagtgaagctatccaaataactggccaactagttgttaaaagctaacagctcaatctcttaaaacacttttcaaaatatgtgggaagcatttgattttcaatttgattttgaattctgcatttggttttatgaatacaaagataagtgaaaagagagaaaggaaaagaaaaaggagaaaaacaaagagatttctaccagtgaaaggggaattaattactctttgttagcactcactgactcttctatgcagttactacatatctagtaaaaccttgtttaatactataaataatattctattcattttgaaaaacacaatgattccttcttttctaggcaatataaggaaagtgatccaaaatttgaaatattaaaataatatctaataaaaagtcacaaagttatcttctttaacaaactttactcttattcttagctgtatatacatttttttaaaagtttgttaaaatatgcttgactagagtttccagttgaaaggcaaaaacttccatcacaacaagaaatttcccatgcctgctcagaagggtagcccctagctctctgtgaatgtgttttatccattcaactgaaaattggtatcaagaaagtccactggttagtgtactagtccatcatagcctagaaaatgatccctatctgcagatcaagattttctcattagaacaatgaattatccagcattcagatctttctagtcaccttagaactttttggttaaaagtacccaggcttgattatttcatgcaaattctatattttacattcttggaaagtctatatgaaaaacaaaaataacatcttcagtttttctcccactgggtcacctcaaggatcagaggccaggaaaaaaaaaaaaaaagactccctggatctctgaatatatgcaaaaagaaggccccatttagtggagccagcaatcctgttcagtcaacaagtattttaactctcagtccaacattatttgaattgagcacctcaagcatgcttagcaatgttctaatcactatggacagatgtaaaagaaactatacatcatttttgccctctgcctgttttccagacatacaggttctgtggaataagatactggactcctcttcccaagatggcacttctttttatttcttgtccccagtgtgtaccttttaaaattattccctctcaacaaaactttataggcagtcttctgcagacttaacgtgttttctgtcatagttagatgtgataattctaagagtgtctatgacttatttccttcacttaattctatccacagtcaaaaatcccccaaggaggaaagctgaaagatgcactgccatattatctttcttaactttttccaacacataatcctctccaactggattataaataaattgaaaataactcattataccaattcactattttattttttaatgaattaaaactagaaaacaaattgatgcaaaccctggaagtcagttgattactatatactacagcagaatgactcagatttcatagaaaggagcaaccaaaatgtcacaacccaaaactttacaagctttgcttcagaattagattgctttataattcttgaatgaggcaatttcaagatatttgtaaaagaacagtaaacattggtaagaatgagctttcaactcataggcttatttccaatttaattgaccatactggatacttaggtcaaatttctgttctctcttccccaaataatattaaagtattatttgaactttttaagatgaggcagttcccctgaaaaagttaatgcagctctccatcagaatccactcttctagggatatgaaaatctcttaacacccaccctacatacacagacacacacacacacacacacacacacacacacacacacacacattcaccctaaggatccaatggaatactgaaaagaaatcacttccttgaaaattttattaaaaaacaaacaaacaaacaaaaagcctgtccacccttgagaatccttcctctccttggaacgtcaatgtttgtgtagatgaaaccatctcatgctctgtggctccagggtttctgttactattttatgcacttgggagaaggcttagaataaaagatgtagcacattttgctttcccatttattgtttggccagctatgccaatgtggtgctattgtttctttaagaaagtacttgactaaaaaaaaaagaaaaaaagaaaaaaaagaaagcatagacatatttttttaaagtataaaaacaacaattctatagatagatggcttaataaaatagcattaggtctatctagccaccaccacctttcaactttttatcactcacaagtagtgtactgttcaccaaattgtgaatttgggggtgcaggggcaggagttggaaattttttaaagttagaaggctccattgttttgttggctctcaaacttagcaaaattagcaatatattatccaatcttctgaacttgatcaagagcatggagaataaacgcgggaaaaaagatcttataggcaaatagaagaatttaaaagataagtaagttccttattgatttttgtgcactctgctctaaaacagatattcagcaagtggagaaaataagaacaaagagaaaaaatacatagatttacctgcaaaaaatagcttctgccaaatcccccttgggtattctttggcatttactggtttatagaagacattctcccttcacccagacatctcaaagagcagtagctctcatgaaaagcaatcactgatctcatttgggaaatgttggaaagtatttccttatgagatgggggttatctactgataaagaaagaatttatgagaaattgttgaaagagatggctaacaatctgtgaagattttttgtttcttggttttgtttttttttttttttttactttatacagtctttatgaatttcttaatgttcaaaatgacttggttcttttcttctttttttatatcagaatgaggaataataagttaaacccacatagactctttaaaactataggctagatagaaatgtatgtttgacttgttgaagctataatcagactatttaaaatgttttgctatttttaatcttaaaagattgtgctaatttattagagcagaacctgtttggctctcctcagaagaaagaatctttccattcaaatcacatggctttccaccaatattttcaaaagataaatctgatttatgcaatggcatcatttattttaaaacagaagaattgtgaaagtttatgcccctcccttgcaaagaccataaagtccagatctggtaggggggcaacaacaaaaggaaaatgttgttgattcttggttttggattttgttttgttttcaatgctagtgtttaatcctgtagtacatatttgcttattgctattttaatattttataagaccttcctgttaggtattagaaagtgatacatagatatcttttttgtgtaatttctatttaaaaaagagagaagactgtcagaagctttaagtgcatatggtacaggataaagatatcaatttaaataaccaattcctatctggaacaatgcttttgttttttaaagaaacctctcacagataagacagaggcccaggggatttttgaagctgtctttattctgcccccatcccaacccagcccttattattttagtatctgcctcagaattttatagagggctgaccaagctgaaactctagaattaaaggaacctcactgaaaacatatatttcacgtgttccctctttttttttttcctttttgtgagatggggtctcgcactgtcccccaggctggagtgcagtggcatgatctcggctcactgcaacctccacctcctgggtttaagcgattctcctgcctcagcctcctgagtagctgggattacaggcacccaccactatgcccggctaattttttggatttttaatagagacggggttttaccatgttggccaggttggactcaaactcctgaccttgtgatttgcccgcctcagcctcccaaattgctgggattacaggcatgagccaccacaccctgcccatgtgttccctcttaatgtatgattacatggatcttaaacatgatccttctctcctcattcttcaactatctttgatggggtctttcaaggggaaaaaaatccaagcttttttaaagtaaaaaaaaaaaaagagaggacacaaaaccaaatgttactgctcaactgaaatatgagttaagatggagacagagtttctcctaataaccggagctgaattacctttcactttcaaaaacatgaccttccacaatccttagaatctgcctttttttatattactgaggcctaaaagtaaacattactcattttattttgcccaaaatgcactgatgtaaagtaggaaaaataaaaacagagctctaaaatccctttcaagccacccattgaccccactcaccaactcatagcaaagtcacttctgttaatcccttaatctgattttgtttggatatttatcttgtacccgctgctaaacacactgcaggagggactctgaaacctcaagctgtctacttacatcttttatctgtgtctgtgtatcatgaaaatgtctattcaaaatatcaaaacctttcaaatatcacgcagcttatattcagtttacataaaggccccaaataccatgtcagatctttttggtaaaagagttaatgaactatgagaattgggattacatcatgtattttgcctcatgtatttttatcacacttataggccaagtgtgataaataaacttacagacactgaattaatttcccctgctactttgaaaccagaaaataatgactggccattcgttacatctgtcttagttgaaaagcatattttttattaaattaattctgattgtatttgaaattattattcaattcacttatggcagaggaatatcaatcctaatgacttctaaaaatgtaactaattgaatcattatcttacatttactgtttaataagcatattttgaaaatgtatggctagagtgtcataataaaatggtatatctttctttagtaattacattaaaattagtcatgtttgatta

SEQ ID NO: 199 - DNA, 7911 bp, Homo sapiens
agaaggcaaatgttcccccagctgtttcctgtctacagtgtctgtgttttgtagataaatgtgaggattttctctaaatccctcttctgtttgctaaatctcactgtcactgctaaattcagagcagatagagcctgcgcaatggaataaagtcctcaaaattgaaatgtgacattgctctcaacatctcccatctctctggatttctttttgcttcattattcctgctaaccaattcattttcagactttgtacttcagaagcaatgggaaaaatcagcagtcttccaacccaattatttaagtgctgcttttgtgatttcttgaaggtgaagatgcacaccatgtcctcctcgcatctcttctacctggcgctgtgcctgctcaccttcaccagctctgccacggctggaccggagacgctctgcggggctgagctggtggatgctcttcagttcgtgtgtggagacaggggcttttatttcagcaggaagattctactcaagttaagaagcagtgttgccagatgcagtggctcactcctgaaattccagcaatttgagaggccaaggcaggaaaattgcttgagctgaggagttcgagaccagcctgagcagcatagtgagaccctgtctctacaaataatcaaaaattaaccagacatggtaatgcatgcctgcagtcccagctactcagaaggctgaggtgggaggatctcttgagcctgagaggttgacgctgtagtgagccacaattgcaccactgcactccagcctgggcaacagtgcaaaaccctgtctcaaaaaaaaaaaagaagaagaagaagaagaagaagaagaagaagaagaagaaggagaagaagcagtgtaatagaatgacttagtgctcagaaagtcttgagtttggatcctggtttgggcatttaataagtgagtggcctgagacaaataaataaacttttctatggctcaatattttcaactgtaaagtgaagatgataacagtgtccatctcataggattgttgtaaaagacaagcccacagggtatggctccagcagtcggagggcgcctcagacaggcatcgtggatgagtgctgcttccggagctgtgatctaaggaggctggagatgtattgcgcacccctcaagcctgccaagtcagctcgctctgtccgtgcccagcgccacaccgacatgcccaagacccagaaggaagtacatttgaagaacgcaagtagagggagtgcaggaaacaagaactacaggatgtaggaagaccctcctgaggagtgaagagtgacatgccaccgcaggatcctttgctctgcacgagttacctgttaaactttggaacacctaccaaaaaataagtttgataacatttaaaagatgggcgtttcccccaatgaaatacacaagtaaacattccaacattgtctttaggagtgatttgcaccttgcaaaaatggtcctggagttggtagattgctgttgatcttttatcaataatgttctatagaaaagaaaaaaaaaatatatatatatatatatcttagtccctgcctctcaagagccacaaatgcatgggtgttgtatagatccagttgcactaaattcctctctgaatcttggctgctggagccattcattcagcaaccttgtctaagtggtttatgaattgtttccttatttgcacttctttctacacaactcgggctgtttgttttacagtgtctgataatcttgttagtctatacccaccacctcccttcataacctttatatttgccgaatttggcctcctcaaaagcagcagcaagtcgtcaagaagcacaccaattctaacccacaagattccatctgtggcatttgtaccaaatataagttggatgcattttattttagacacaaagctttatttttccacatcatgcttacaaaaaagaataatgcaaatagttgcaactttgaggccaatcatttttaggcatatgttttaaacatagaaagtttcttcaactcaaaagagttccttcaaatgatgagttaatgtgcaacctaattagtaactttcctctttttattttttccatatagagcactatgtaaatttagcatatcaattatacaggatatatcaaacagtatgtaaaactctgttttttagtataatggtgctattttgtagtttgttatatgaaagagtctggccaaaacggtaatacgtgaaagcaaaacaataggggaagcctggagccaaagatgacacaaggggaagggtactgaaaacaccatccatttgggaaagaaggcaaagtccccccagttatgccttccaagaggaacttcagacacaaaagtccactgatgcaaattggactggcgagtccagagaggaaactgtggaatggaaaaagcagaaggctaggaattttagcagtcctggtttctttttctcatggaagaaatgaacatctgccagctgtgtcatggactcaccactgtgtgaccttgggcaagtcacttcacctctctgtgcctcagtttcctcatctgcaaaatgggggcaatatgtcatctacctacctcaaaggggtggtataaggtttaaaaagataaagattcagattttttttaccctgggttgctgtaagggtgcaacatcagggcgcttgagttgctgagatgcaaggaattctataaataacccattcatagcatagctagagattggtgaattgaatgctcctgacatctcagttcttgtcagtgaagctatccaaataactggccaactagttgttaaaagctaacagctcaatctcttaaaacacttttcaaaatatgtgggaagcatttgattttcaatttgattttgaattctgcatttggttttatgaatacaaagataagtgaaaagagagaaaggaaaagaaaaaggagaaaaacaaagagatttctaccagtgaaaggggaattaattactctttgttagcactcactgactcttctatgcagttactacatatctagtaaaaccttgtttaatactataaataatattctattcattttgaaaaacacaatgattccttcttttctaggcaatataaggaaagtgatccaaaatttgaaatattaaaataatatctaataaaaagtcacaaagttatcttctttaacaaactttactcttattcttagctgtatatacatttttttaaaagtttgttaaaatatgcttgactagagtttccagttgaaaggcaaaaacttccatcacaacaagaaatttcccatgcctgctcagaagggtagcccctagctctctgtgaatgtgttttatccattcaactgaaaattggtatcaagaaagtccactggttagtgtactagtccatcatagcctagaaaatgatccctatctgcagatcaagattttctcattagaacaatgaattatccagcattcagatctttctagtcaccttagaactttttggttaaaagtacccaggcttgattatttcatgcaaattctatattttacattcttggaaagtctatatgaaaaacaaaaataacatcttcagtttttctcccactgggtcacctcaaggatcagaggccaggaaaaaaaaaaaaaaagactccctggatctctgaatatatgcaaaaagaaggccccatttagtggagccagcaatcctgttcagtcaacaagtattttaactctcagtccaacattatttgaattgagcacctcaagcatgcttagcaatgttctaatcactatggacagatgtaaaagaaactatacatcatttttgccctctgcctgttttccagacatacaggttctgtggaataagatactggactcctcttcccaagatggcacttctttttatttcttgtccccagtgtgtaccttttaaaattattccctctcaacaaaactttataggcagtcttctgcagacttaacgtgttttctgtcatagttagatgtgataattctaagagtgtctatgacttatttccttcacttaattctatccacagtcaaaaatcccccaaggaggaaagctgaaagatgcactgccatattatctttcttaactttttccaacacataatcctctccaactggattataaataaattgaaaataactcattataccaattcactattttattttttaatgaattaaaactagaaaacaaattgatgcaaaccctggaagtcagttgattactatatactacagcagaatgactcagatttcatagaaaggagcaaccaaaatgtcacaacccaaaactttacaagctttgcttcagaattagattgctttataattcttgaatgaggcaatttcaagatatttgtaaaagaacagtaaacattggtaagaatgagctttcaactcataggcttatttccaatttaattgaccatactggatacttaggtcaaatttctgttctctcttccccaaataatattaaagtattatttgaactttttaagatgaggcagttcccctgaaaaagttaatgcagctctccatcagaatccactcttctagggatatgaaaatctcttaacacccaccctacatacacagacacacacacacacacacacacacacacacacacacacacacattcaccctaaggatccaatggaatactgaaaagaaatcacttccttgaaaattttattaaaaaacaaacaaacaaacaaaaagcctgtccacccttgagaatccttcctctccttggaacgtcaatgtttgtgtagatgaaaccatctcatgctctgtggctccagggtttctgttactattttatgcacttgggagaaggcttagaataaaagatgtagcacattttgctttcccatttattgtttggccagctatgccaatgtggtgctattgtttctttaagaaagtacttgactaaaaaaaaaagaaaaaaagaaaaaaaagaaagcatagacatatttttttaaagtataaaaacaacaattctatagatagatggcttaataaaatagcattaggtctatctagccaccaccacctttcaactttttatcactcacaagtagtgtactgttcaccaaattgtgaatttgggggtgcaggggcaggagttggaaattttttaaagttagaaggctccattgttttgttggctctcaaacttagcaaaattagcaatatattatccaatcttctgaacttgatcaagagcatggagaataaacgcgggaaaaaagatcttataggcaaatagaagaatttaaaagataagtaagttccttattgatttttgtgcactctgctctaaaacagatattcagcaagtggagaaaataagaacaaagagaaaaaatacatagatttacctgcaaaaaatagcttctgccaaatcccccttgggtattctttggcatttactggtttatagaagacattctcccttcacccagacatctcaaagagcagtagctctcatgaaaagcaatcactgatctcatttgggaaatgttggaaagtatttccttatgagatgggggttatctactgataaagaaagaatttatgagaaattgttgaaagagatggctaacaatctgtgaagattttttgtttcttggttttgtttttttttttttttttactttatacagtctttatgaatttcttaatgttcaaaatgacttggttcttttcttctttttttatatcagaatgaggaataataagttaaacccacatagactctttaaaactataggctagatagaaatgtatgtttgacttgttgaagctataatcagactatttaaaatgttttgctatttttaatcttaaaagattgtgctaatttattagagcagaacctgtttggctctcctcagaagaaagaatctttccattcaaatcacatggctttccaccaatattttcaaaagataaatctgatttatgcaatggcatcatttattttaaaacagaagaattgtgaaagtttatgcccctcccttgcaaagaccataaagtccagatctggtaggggggcaacaacaaaaggaaaatgttgttgattcttggttttggattttgttttgttttcaatgctagtgtttaatcctgtagtacatatttgcttattgctattttaatattttataagaccttcctgttaggtattagaaagtgatacatagatatcttttttgtgtaatttctatttaaaaaagagagaagactgtcagaagctttaagtgcatatggtacaggataaagatatcaatttaaataaccaattcctatctggaacaatgcttttgttttttaaagaaacctctcacagataagacagaggcccaggggatttttgaagctgtctttattctgcccccatcccaacccagcccttattattttagtatctgcctcagaattttatagagggctgaccaagctgaaactctagaattaaaggaacctcactgaaaacatatatttcacgtgttccctctttttttttttcctttttgtgagatggggtctcgcactgtcccccaggctggagtgcagtggcatgatctcggctcactgcaacctccacctcctgggtttaagcgattctcctgcctcagcctcctgagtagctgggattacaggcacccaccactatgcccggctaattttttggatttttaatagagacggggttttaccatgttggccaggttggactcaaactcctgaccttgtgatttgcccgcctcagcctcccaaattgctgggattacaggcatgagccaccacaccctgcccatgtgttccctcttaatgtatgattacatggatcttaaacatgatccttctctcctcattcttcaactatctttgatggggtctttcaaggggaaaaaaatccaagcttttttaaagtaaaaaaaaaaaaagagaggacacaaaaccaaatgttactgctcaactgaaatatgagttaagatggagacagagtttctcctaataaccggagctgaattacctttcactttcaaaaacatgaccttccacaatccttagaatctgcctttttttatattactgaggcctaaaagtaaacattactcattttattttgcccaaaatgcactgatgtaaagtaggaaaaataaaaacagagctctaaaatccctttcaagccacccattgaccccactcaccaactcatagcaaagtcacttctgttaatcccttaatctgattttgtttggatatttatcttgtacccgctgctaaacacactgcaggagggactctgaaacctcaagctgtctacttacatcttttatctgtgtctgtgtatcatgaaaatgtctattcaaaatatcaaaacctttcaaatatcacgcagcttatattcagtttacataaaggccccaaataccatgtcagatctttttggtaaaagagttaatgaactatgagaattgggattacatcatgtattttgcctcatgtatttttatcacacttataggccaagtgtgataaataaacttacagacactgaattaatttcccctgctactttgaaaccagaaaataatgactggccattcgttacatctgtcttagttgaaaagcatattttttattaaattaattctgattgtatttgaaattattattcaattcacttatggcagaggaatatcaatcctaatgacttctaaaaatgtaactaattgaatcattatcttacatttactgtttaataagcatattttgaaaatgtatggctagagtgtcataataaaatggtatatctttctttagtaattacattaaaattagtcatgtttgatta

SEQ ID NO: 200 - DNA, 1406 bp, Homo sapiens
acgtatctgccacttagtgcagcattcagttgctgctttcaaacacttcaccactacgactttccctagtcaagtaagtggctccaggagttaaagatacacccttgtcaggcacctgattctgctgttcctgagatgccaacacatgcaggccaccttgctttcaaagaaatgacgtcactgtgcatacatactatgtgatctagcagctggagtttttgtctccttacttaggggatcataaaagaggctgtggagcgttatctctgcattaattacaagttaagaaaattgtttccaaatgcacttttcatgctgtgtatgctgaacacttcagaagtggagctcttaataagttgttacttttttctgtacttgaagcaggaagtggtttgagggagctgcgtggtctttcacatgtaattcagtgggtaaaggtgtcctgcccagaggcagagctcaccagctgattgtactctgactctcaaggtatttccaagtgagtgagtcgggggaagggagtaagggagtggactggagcttgggtcactatctgggctgctacaataggcatacaatggaaataggtggcttgactggggggaaaagattgacttaaatcccagctgtgcaatttgttcattgtttcaatggacaaaaggcagtttacccaggctcataatagcatacctgcctgggtgtccaaatgtaactagatgctttcacaaaccccacccacaaagcagcacatgtttttaagacttcagttttctattcacatcggcctcataatacccaccctgacctgctgtaaaagacctggaacaaacaaaaatgattacacctacagtgaagatgcacaccatgtcctcctcgcatctcttctacctggcgctgtgcctgctcaccttcaccagctctgccacggctggaccggagacgctctgcggggctgagctggtggatgctcttcagttcgtgtgtggagacaggggcttttatttcaacaagcccacagggtatggctccagcagtcggagggcgcctcagacaggcatcgtggatgagtgctgcttccggagctgtgatctaaggaggctggagatgtattgcgcacccctcaagcctgccaagtcagctcgctctgtccgtgcccagcgccacaccgacatgcccaagacccagaaggaagtacatttgaagaacgcaagtagagggagtgcaggaaacaagaactacaggatgtaggaagaccctcctgaggagtgaagagtgacatgccaccgcaggatcctttgctctgcacgagttacctgttaaactttggaacacctaccaaaaaataagtttgataacatttaaaagatgggcgtttcccccaatgaaatacacaagtaaacattcca

SEQ ID NO: 201 - DNA, 1681 bp, Homo sapiens
agaaggcaaatgttcccccagctgtttcctgtctacagtgtctgtgttttgtagataaatgtgaggattttctctaaatccctcttctgtttgctaaatctcactgtcactgctaaattcagagcagatagagcctgcgcaatggaataaagtcctcaaaattgaaatgtgacattgctctcaacatctcccatctctctggatttctttttgcttcattattcctgctaaccaattcattttcagactttgtacttcagaagcaatgggaaaaatcagcagtcttccaacccaattatttaagtgctgcttttgtgatttcttgaaggtgaagatgcacaccatgtcctcctcgcatctcttctacctggcgctgtgcctgctcaccttcaccagctctgccacggctggaccggagacgctctgcggggctgagctggtggatgctcttcagttcgtgtgtggagacaggggcttttatttcaacaagcccacagggtatggctccagcagtcggagggcgcctcagacaggcatcgtggatgagtgctgcttccggagctgtgatctaaggaggctggagatgtattgcgcacccctcaagcctgccaagtcagctcgctctgtccgtgcccagcgccacaccgacatgcccaagacccagaagtatcagcccccatctaccaacaagaacacgaagtctcagagaaggaaaggttggccaaagacacatccaggaggggaacagaaggaggggacagaagcaagtctgcagatcagaggaaagaagaaagagcagaggagggagattggaagtagaaatgctgaatgcagaggcaaaaaaggaaaatgaaggacaggaggattaaacagacagaggcaaggatgatgagagaggagcagacagcaagaatgaaaagcagaaaatacaatagaggaaatgaagaaaagtaggcctgctggagctagatgatgatgtgatggaaatagaagtaaccttttagagaatctcgctaagaaacatggagaaaacggaaaagaaaaatgtaatgccctagaaagcgcaaagaaagacagtggcaaaaatgaaaaaaaaaaataaaaattataaaagaggcaaaaaaagacacactattctctgcctctaaaacacaattaaataaaagaatttaaataaaaattaaggcttctatatgcatttttaaattttgtatgaatctgttatggaagaattgcctatgtcaatatatgttcagagttaaatattagccccaaatgctcagcaagactgaattgtgtcatagaagttcccagattcccttttcccgcaatgtcattggaggctgcattccttagtcaagtccagggtttaggccaaagggcatccggtattgcctaaaaccctgtgaggtctgtgaggtaacttttgagaagaggtcactgcactcttcttcatcttttttgcactttggaatcagatataaaagatgtataagtttgctagggctgccataacaaagtatcataggctaggtagtttaaaccacagaaattgattttttcatagttctgggagttgaaagtccaaaatcaaagtatcagcccttgcaagggccttagagaaggctctgtcatgggctcctcccctcggcttgtaggtggcctccttcttcgtccccct

SEQ ID NO: 202 - DNA, 885 bp, Homo sapiens
agaaggcaaatgttcccccagctgtttcctgtctacagtgtctgtgttttgtagataaatgtgaggattttctctaaatccctcttctgtttgctaaatctcactgtcactgctaaattcagagcagatagagcctgcgcaatggaataaagtcctcaaaattgaaatgtgacattgctctcaacatctcccatctctctggatttctttttgcttcattattcctgctaaccaattcattttcagactttgtacttcagaagcaatgggaaaaatcagcagtcttccaacccaattatttaagtgctgcttttgtgatttcttgaaggtgaagatgcacaccatgtcctcctcgcatctcttctacctggcgctgtgcctgctcaccttcaccagctctgccacggctggaccggagacgctctgcggggctgagctggtggatgctcttcagttcgtgtgtggagacaggggcttttatttcaacaagcccacagggtatggctccagcagtcggagggcgcctcagacaggcatcgtggatgagtgctgcttccggagctgtgatctaaggaggctggagatgtattgcgcacccctcaagcctgccaagtcagctcgctctgtccgtgcccagcgccacaccgacatgcccaagacccagaaggaagtacatttgaagaacgcaagtagagggagtgcaggaaacaagaactacaggatgtaggaagaccctcctgaggagtgaagagtgacatgccaccgcaggatcctttgctctgcacgagttacctgttaaactttggaacacctaccaaaaaataagtttgataacatttaaaagatgggcgtttcccccaatgaaatacacaagtaaacattcca

SEQ ID NO: 203 - DNA, 2748 bp, Homo sapiens
acgtatctgccacttagtgcagcattcagttgctgctttcaaacacttcaccactacgactttccctagtcaagtaagtggctccaggagttaaagatacacccttgtcaggcacctgattctgctgttcctgagatgccaacacatgcaggccaccttgctttcaaagaaatgacgtcactgtgcatacatactatgtgatctagcagctggagtttttgtctccttacttaggggatcataaaagaggctgtggagcgttatctctgcattaattacaagttaagaaaattgtttccaaatgcacttttcatgctgtgtatgctgaacacttcagaagtggagctcttaataagttgttacttttttctgtacttgaagcaggaagtggtttgagggagctgcgtggtctttcacatgtaattcagtgggtaaaggtgtcctgcccagaggcagagctcaccagctgattgtactctgactctcaaggtatttccaagtgagtgagtcgggggaagggagtaagggagtggactggagcttgggtcactatctgggctgctacaataggcatacaatggaaataggtggcttgactggggggaaaagattgacttaaatcccagctgtgcaatttgttcattgtttcaatggacaaaaggcagtttacccaggctcataatagcatacctgcctgggtgtccaaatgtaactagatgctttcacaaaccccacccacaaagcagcacatgtttttaagacttcagttttctattcacatcggcctcataatacccaccctgacctgctgtaaaagacctggaacaaacaaaaatgattacacctacagtgaagatgcacaccatgtcctcctcgcatctcttctacctggcgctgtgcctgctcaccttcaccagctctgccacggctggaccggagacgctctgcggggctgagctggtggatgctcttcagttcgtgtgtggagacaggggcttttatttcagcaggaagattctactcaagttaagaagcagtgttgccagatgcagtggctcactcctgaaattccagcaatttgagaggccaaggcaggaaaattgcttgagctgaggagttcgagaccagcctgagcagcatagtgagaccctgtctctacaaataatcaaaaattaaccagacatggtaatgcatgcctgcagtcccagctactcagaaggctgaggtgggaggatctcttgagcctgagaggttgacgctgtagtgagccacaattgcaccactgcactccagcctgggcaacagtgcaaaaccctgtctcaaaaaaaaaaaagaagaagaagaagaagaagaagaagaagaagaagaagaaggagaagaagcagtgtaatagaatgacttagtgctcagaaagtcttgagtttggatcctggtttgggcatttaataagtgagtggcctgagacaaataaataaacttttctatggctcaatattttcaactgtaaagtgaagatgataacagtgtccatctcataggattgttgtaaaagacaagcccacagggtatggctccagcagtcggagggcgcctcagacaggcatcgtggatgagtgctgcttccggagctgtgatctaaggaggctggagatgtattgcgcacccctcaagcctgccaagtcagctcgctctgtccgtgcccagcgccacaccgacatgcccaagacccagaagtatcagcccccatctaccaacaagaacacgaagtctcagagaaggaaaggttggccaaagacacatccaggaggggaacagaaggaggggacagaagcaagtctgcagatcagaggaaagaagaaagagcagaggagggagattggaagtagaaatgctgaatgcagaggcaaaaaaggaaaatgaaggacaggaggattaaacagacagaggcaaggatgatgagagaggagcagacagcaagaatgaaaagcagaaaatacaatagaggaaatgaagaaaagtaggcctgctggagctagatgatgatgtgatggaaatagaagtaaccttttagagaatctcgctaagaaacatggagaaaacggaaaagaaaaatgtaatgccctagaaagcgcaaagaaagacagtggcaaaaatgaaaaaaaaaaataaaaattataaaagaggcaaaaaaagacacactattctctgcctctaaaacacaattaaataaaagaatttaaataaaaattaaggcttctatatgcatttttaaattttgtatgaatctgttatggaagaattgcctatgtcaatatatgttcagagttaaatattagccccaaatgctcagcaagactgaattgtgtcatagaagttcccagattcccttttcccgcaatgtcattggaggctgcattccttagtcaagtccagggtttaggccaaagggcatccggtattgcctaaaaccctgtgaggtctgtgaggtaacttttgagaagaggtcactgcactcttcttcatcttttttgcactttggaatcagatataaaagatgtataagtttgctagggctgccataacaaagtatcataggctaggtagtttaaaccacagaaattgattttttcatagttctgggagttgaaagtccaaaatcaaagtatcagcccttgcaagggccttagagaaggctctgtcatgggctcctcccctcggcttgtaggtggcctccttcttcgtccccct

SEQ ID NO: 204 - DNA, 328 bp, Artificial
  Synthetic oligonucleotide
agaaggcaaatgttcccccagctgtttcctgtctacagtgtctgtgttttgtagataaatgtgaggattttctctaaatccctcttctgtttgctaaatctcactgtcactgctaaattcagagcagatagagcctgcgcaatggaataaagtcctcaaaattgaaatgtgacattgctctcaacatctcccatctctctggatttctttttgcttcattattcctgctaaccaattcattttcagactttgtacttcagaagcaatgggaaaaatcagcagtcttccaacccaattatttaagtgctgcttttgtgatttcttgaag

SEQ ID NO: 205 - DNA, 849 bp, Artificial
  Synthetic oligonucleotide
acgtatctgccacttagtgcagcattcagttgctgctttcaaacacttcaccactacgactttccctagtcaagtaagtggctccaggagttaaagatacacccttgtcaggcacctgattctgctgttcctgagatgccaacacatgcaggccaccttgctttcaaagaaatgacgtcactgtgcatacatactatgtgatctagcagctggagtttttgtctccttacttaggggatcataaaagaggctgtggagcgttatctctgcattaattacaagttaagaaaattgtttccaaatgcacttttcatgctgtgtatgctgaacacttcagaagtggagctcttaataagttgttacttttttctgtacttgaagcaggaagtggtttgagggagctgcgtggtctttcacatgtaattcagtgggtaaaggtgtcctgcccagaggcagagctcaccagctgattgtactctgactctcaaggtatttccaagtgagtgagtcgggggaagggagtaagggagtggactggagcttgggtcactatctgggctgctacaataggcatacaatggaaataggtggcttgactggggggaaaagattgacttaaatcccagctgtgcaatttgttcattgtttcaatggacaaaaggcagtttacccaggctcataatagcatacctgcctgggtgtccaaatgtaactagatgctttcacaaaccccacccacaaagcagcacatgtttttaagacttcagttttctattcacatcggcctcataatacccaccctgacctgctgtaaaagacctggaacaaacaaaaatgattacacctaca

SEQ ID NO: 206 - DNA, 157 bp, Artificial
  Synthetic oligonucleotide
gtgaagatgcacaccatgtcctcctcgcatctcttctacctggcgctgtgcctgctcaccttcaccagctctgccacggctggaccggagacgctctgcggggctgagctggtggatgctcttcagttcgtgtgtggagacaggggcttttatttca

SEQ ID NO: 207 - DNA, 546 bp, Artificial
  Synthetic oligonucleotide
gcaggaagattctactcaagttaagaagcagtgttgccagatgcagtggctcactcctgaaattccagcaatttgagaggccaaggcaggaaaattgcttgagctgaggagttcgagaccagcctgagcagcatagtgagaccctgtctctacaaataatcaaaaattaaccagacatggtaatgcatgcctgcagtcccagctactcagaaggctgaggtgggaggatctcttgagcctgagaggttgacgctgtagtgagccacaattgcaccactgcactccagcctgggcaacagtgcaaaaccctgtctcaaaaaaaaaaaagaagaagaagaagaagaagaagaagaagaagaagaagaaggagaagaagcagtgtaatagaatgacttagtgctcagaaagtcttgagtttggatcctggtttgggcatttaataagtgagtggcctgagacaaataaataaacttttctatggctcaatattttcaactgtaaagtgaagatgataacagtgtccatctcataggattgttgtaaaag

SEQ ID NO: 208 - DNA, 182 bp, Artificial
  Synthetic oligonucleotide
acaagcccacagggtatggctccagcagtcggagggcgcctcagacaggcatcgtggatgagtgctgcttccggagctgtgatctaaggaggctggagatgtattgcgcacccctcaagcctgccaagtcagctcgctctgtccgtgcccagcgccacaccgacatgcccaagacccagaag

SEQ ID NO: 209 - DNA, 965 bp, Artificial
  Synthetic oligonucleotide
gttggccaaagacacatccaggaggggaacagaaggaggggacagaagcaagtctgcagatcagaggaaagaagaaagagcagaggagggagattggaagtagaaatgctgaatgcagaggcaaaaaaggaaaatgaaggacaggaggattaaacagacagaggcaaggatgatgagagaggagcagacagcaagaatgaaaagcagaaaatacaatagaggaaatgaagaaaagtaggcctgctggagctagatgatgatgtgatggaaatagaagtaaccttttagagaatctcgctaagaaacatggagaaaacggaaaagaaaaatgtaatgccctagaaagcgcaaagaaagacagtggcaaaaatgaaaaaaaaaaataaaaattataaaagaggcaaaaaaagacacactattctctgcctctaaaacacaattaaataaaagaatttaaataaaaattaaggcttctatatgcatttttaaattttgtatgaatctgttatggaagaattgcctatgtcaatatatgttcagagttaaatattagccccaaatgctcagcaagactgaattgtgtcatagaagttcccagattcccttttcccgcaatgtcattggaggctgcattccttagtcaagtccagggtttaggccaaagggcatccggtattgcctaaaaccctgtgaggtctgtgaggtaacttttgagaagaggtcactgcactcttcttcatcttttttgcactttggaatcagatataaaagatgtataagtttgctagggctgccataacaaagtatcataggctaggtagtttaaaccacagaaattgattttttcatagttctgggagttgaaagtccaaaatcaaagtatcagcccttgcaagggccttagagaaggctctgtcatgggctcctcccctcggcttgtaggtggcctccttcttcgtccccct

SEQ ID NO: 210 - DNA, 3793 bp, Artificial
  Synthetic oligonucleotide
gaagtacatttgaagaacgcaagtagagggagtgcaggaaacaagaactacaggatgtaggaagaccctcctgaggagtgaagagtgacatgccaccgcaggatcctttgctctgcacgagttacctgttaaactttggaacacctaccaaaaaataagtttgataacatttaaaagatgggcgtttcccccaatgaaatacacaagtaaacattccaacattgtctttaggagtgatttgcaccttgcaaaaatggtcctggagttggtagattgctgttgatcttttatcaataatgttctatagaaaagaaaaaaaaaatatatatatatatatatcttagtccctgcctctcaagagccacaaatgcatgggtgttgtatagatccagttgcactaaattcctctctgaatcttggctgctggagccattcattcagcaaccttgtctaagtggtttatgaattgtttccttatttgcacttctttctacacaactcgggctgtttgttttacagtgtctgataatcttgttagtctatacccaccacctcccttcataacctttatatttgccgaatttggcctcctcaaaagcagcagcaagtcgtcaagaagcacaccaattctaacccacaagattccatctgtggcatttgtaccaaatataagttggatgcattttattttagacacaaagctttatttttccacatcatgcttacaaaaaagaataatgcaaatagttgcaactttgaggccaatcatttttaggcatatgttttaaacatagaaagtttcttcaactcaaaagagttccttcaaatgatgagttaatgtgcaacctaattagtaactttcctctttttattttttccatatagagcactatgtaaatttagcatatcaattatacaggatatatcaaacagtatgtaaaactctgttttttagtataatggtgctattttgtagtttgttatatgaaagagtctggccaaaacggtaatacgtgaaagcaaaacaataggggaagcctggagccaaagatgacacaaggggaagggtactgaaaacaccatccatttgggaaagaaggcaaagtccccccagttatgccttccaagaggaacttcagacacaaaagtccactgatgcaaattggactggcgagtccagagaggaaactgtggaatggaaaaagcagaaggctaggaattttagcagtcctggtttctttttctcatggaagaaatgaacatctgccagctgtgtcatggactcaccactgtgtgaccttgggcaagtcacttcacctctctgtgcctcagtttcctcatctgcaaaatgggggcaatatgtcatctacctacctcaaaggggtggtataaggtttaaaaagataaagattcagattttttttaccctgggttgctgtaagggtgcaacatcagggcgcttgagttgctgagatgcaaggaattctataaataacccattcatagcatagctagagattggtgaattgaatgctcctgacatctcagttcttgtcagtgaagctatccaaataactggccaactagttgttaaaagctaacagctcaatctcttaaaacacttttcaaaatatgtgggaagcatttgattttcaatttgattttgaattctgcatttggttttatgaatacaaagataagtgaaaagagagaaaggaaaagaaaaaggagaaaaacaaagagatttctaccagtgaaaggggaattaattactctttgttagcactcactgactcttctatgcagttactacatatctagtaaaaccttgtttaatactataaataatattctattcattttgaaaaacacaatgattccttcttttctaggcaatataaggaaagtgatccaaaatttgaaatattaaaataatatctaataaaaagtcacaaagttatcttctttaacaaactttactcttattcttagctgtatatacatttttttaaaagtttgttaaaatatgcttgactagagtttccagttgaaaggcaaaaacttccatcacaacaagaaatttcccatgcctgctcagaagggtagcccctagctctctgtgaatgtgttttatccattcaactgaaaattggtatcaagaaagtccactggttagtgtactagtccatcatagcctagaaaatgatccctatctgcagatcaagattttctcattagaacaatgaattatccagcattcagatctttctagtcaccttagaactttttggttaaaagtacccaggcttgattatttcatgcaaattctatattttacattcttggaaagtctatatgaaaaacaaaaataacatcttcagtttttctcccactgggtcacctcaaggatcagaggccaggaaaaaaaaaaaaaaagactccctggatctctgaatatatgcaaaaagaaggccccatttagtggagccagcaatcctgttcagtcaacaagtattttaactctcagtccaacattatttgaattgagcacctcaagcatgcttagcaatgttctaatcactatggacagatgtaaaagaaactatacatcatttttgccctctgcctgttttccagacatacaggttctgtggaataagatactggactcctcttcccaagatggcacttctttttatttcttgtccccagtgtgtaccttttaaaattattccctctcaacaaaactttataggcagtcttctgcagacttaacgtgttttctgtcatagttagatgtgataattctaagagtgtctatgacttatttccttcacttaattctatccacagtcaaaaatcccccaaggaggaaagctgaaagatgcactgccatattatctttcttaactttttccaacacataatcctctccaactggattataaataaattgaaaataactcattataccaattcactattttattttttaatgaattaaaactagaaaacaaattgatgcaaaccctggaagtcagttgattactatatactacagcagaatgactcagatttcatagaaaggagcaaccaaaatgtcacaacccaaaactttacaagctttgcttcagaattagattgctttataattcttgaatgaggcaatttcaagatatttgtaaaagaacagtaaacattggtaagaatgagctttcaactcataggcttatttccaatttaattgaccatactggatacttaggtcaaatttctgttctctcttccccaaataatattaaagtattatttgaactttttaagatgaggcagttcccctgaaaaagttaatgcagctctccatcagaatccactcttctagggatatgaaaatctcttaacacccaccctacatacacagacacacacacacacacacacacacacacacacacacacacacattcaccctaaggatccaatggaatactgaaaagaaatcacttccttgaaaattttattaaaaaacaaacaaacaaacaaaaagcctgtccacccttgagaatccttcctctccttggaacgtcaatgtttgtgtagatgaaaccatctcatgctctgtggctccagggtttctgttactattttatgcacttgggagaaggcttagaataaaagatgtagcacattttgctttcccatttattgtttggccagctatgccaatgtggtgctattgtttctttaagaaagtacttgactaaaaaaaaaagaaaaaaagaaaaaaaagaaa

SEQ ID NO: 211 - DNA, 168 bp, Artificial
  Synthetic oligonucleotide
gcatagacatatttttttaaagtataaaaacaacaattctatagatagatggcttaataaaatagcattaggtctatctagccaccaccacctttcaactttttatcactcacaagtagtgtactgttcaccaaattgtgaatttgggggtgcaggggcaggagttgg

SEQ ID NO: 212 - DNA, 1814 bp, Artificial
  Synthetic oligonucleotide
aaattttttaaagttagaaggctccattgttttgttggctctcaaacttagcaaaattagcaatatattatccaatcttctgaacttgatcaagagcatggagaataaacgcgggaaaaaagatcttataggcaaatagaagaatttaaaagataagtaagttccttattgatttttgtgcactctgctctaaaacagatattcagcaagtggagaaaataagaacaaagagaaaaaatacatagatttacctgcaaaaaatagcttctgccaaatcccccttgggtattctttggcatttactggtttatagaagacattctcccttcacccagacatctcaaagagcagtagctctcatgaaaagcaatcactgatctcatttgggaaatgttggaaagtatttccttatgagatgggggttatctactgataaagaaagaatttatgagaaattgttgaaagagatggctaacaatctgtgaagattttttgtttcttggttttgtttttttttttttttttactttatacagtctttatgaatttcttaatgttcaaaatgacttggttcttttcttctttttttatatcagaatgaggaataataagttaaacccacatagactctttaaaactataggctagatagaaatgtatgtttgacttgttgaagctataatcagactatttaaaatgttttgctatttttaatcttaaaagattgtgctaatttattagagcagaacctgtttggctctcctcagaagaaagaatctttccattcaaatcacatggctttccaccaatattttcaaaagataaatctgatttatgcaatggcatcatttattttaaaacagaagaattgtgaaagtttatgcccctcccttgcaaagaccataaagtccagatctggtaggggggcaacaacaaaaggaaaatgttgttgattcttggttttggattttgttttgttttcaatgctagtgtttaatcctgtagtacatatttgcttattgctattttaatattttataagaccttcctgttaggtattagaaagtgatacatagatatcttttttgtgtaatttctatttaaaaaagagagaagactgtcagaagctttaagtgcatatggtacaggataaagatatcaatttaaataaccaattcctatctggaacaatgcttttgttttttaaagaaacctctcacagataagacagaggcccaggggatttttgaagctgtctttattctgcccccatcccaacccagcccttattattttagtatctgcctcagaattttatagagggctgaccaagctgaaactctagaattaaaggaacctcactgaaaacatatatttcacgtgttccctctttttttttttcctttttgtgagatggggtctcgcactgtcccccaggctggagtgcagtggcatgatctcggctcactgcaacctccacctcctgggtttaagcgattctcctgcctcagcctcctgagtagctgggattacaggcacccaccactatgcccggctaattttttggatttttaatagagacggggttttaccatgttggccaggttggactcaaactcctgaccttgtgatttgcccgcctcagcctcccaaattgctgggattacaggcatgagccaccacaccctgcccatgtgttccctcttaatgtatgattacatggatcttaaacatgatccttctctcctcattcttcaactatctttgatggggtctttcaaggggaaaaaaatccaagcttttttaaagtaaaa

SEQ ID NO: 213 - DNA, 326 bp, Artificial
  Synthetic oligonucleotide
atggagacagagtttctcctaataaccggagctgaattacctttcactttcaaaaacatgaccttccacaatccttagaatctgcctttttttatattactgaggcctaaaagtaaacattactcattttattttgcccaaaatgcactgatgtaaagtaggaaaaataaaaacagagctctaaaatccctttcaagccacccattgaccccactcaccaactcatagcaaagtcacttctgttaatcccttaatctgattttgtttggatatttatcttgtacccgctgctaaacacactgcaggagggactctgaaacctcaag

SEQ ID NO: 214 - DNA, 161 bp, Artificial
  Synthetic oligonucleotide
ctgtctacttacatcttttatctgtgtctgtgtatcatgaaaatgtctattcaaaatatcaaaacctttcaaatatcacgcagcttatattcagtttacataaaggccccaaataccatgtcagatctttttggtaaaagagttaatgaactatgagaatt

SEQ ID NO: 215 - DNA, 226 bp, Artificial
  Synthetic oligonucleotide
gggattacatcatgtattttgcctcatgtatttttatcacacttataggccaagtgtgataaataaacttacagacactgaattaatttcccctgctactttgaaaccagaaaataatgactggccattcgttacatctgtcttagttgaaaagcatattttttattaaattaattctgattgtatttgaaattattattcaattcacttatggcagaggaatatc

SEQ ID NO: 216 - DNA, 374 bp, Artificial
  Synthetic oligonucleotide
aatcctaatgacttctaaaaatgtaactaattgaatcattatcttacatttactgtttaataagcatattttgaaaatgtatggctagagtgtcataataaaatggtatatctttctttagtaattacattaaaattagtcatgtttgattaattagttcttttggataatgttggtgtaatgtgtcattccttaagaattctactgttatataccatttttattaaggtcattgcaataaataaacatgaaaacatacccagaaaaacaaaactaatcacacacaaaaatgaagacatctcatagaatttacagattctatttaaaagtaaatatgtttcaaaggacttgcaaaagctatgtaagagatgtat

SEQ ID NO: 217 - DNA, 49 bp, Artificial
  Synthetic oligonucleotide
tatcagcccccatctaccaacaagaacacgaagtctcagagaaggaaag

SEQ ID NO: 218 - DNA, 33 bp, Artificial
  Synthetic oligonucleotide
aaaaaaaaagagaggacacaaaaccaaatgtta

SEQ ID NO: 219 - DNA, 25 bp, Artificial
  Synthetic oligonucleotide
ctgctcaactgaaatatgagttaag

SEQ ID NO: 220 - protein, 195 aa, Homo sapiens
MGKISSLPTQLFKCCFCDFLKVKMHTMSSSHLFYLALCLLTFTSSATAGPETLCGAELVDALQFVCGDRGFYFNKPTGYGSSSRRAPQTGIVDECCFRSCDLRRLEMYCAPLKPAKSARSVRAQRHTDMPKTQKYQPPSTNKNTKSQRRKGWPKTHPGGEQKEGTEASLQIRGKKKEQRREIGSRNAECRGKKGK

SEQ ID NO: 221 - protein, 137 aa, Homo sapiens
MITPTVKMHTMSSSHLFYLALCLLTFTSSATAGPETLCGAELVDALQFVCGDRGFYFNKPTGYGSSSRRAPQTGIVDECCFRSCDLRRLEMYCAPLKPAKSARSVRAQRHTDMPKTQKEVHLKNASRGSAGNKNYRM

SEQ ID NO: 222 - protein, 130 aa, Homo sapiens
MHTMSSSHLFYLALCLLTFTSSATAGPETLCGAELVDALQFVCGDRGFYFNKPTGYGSSSRRAPQTGIVDECCFRSCDLRRLEMYCAPLKPAKSARSVRAQRHTDMPKTQKEVHLKNASRGSAGNKNYRM

SEQ ID NO: 223 - protein, 153 aa, Homo sapiens
MGKISSLPTQLFKCCFCDFLKVKMHTMSSSHLFYLALCLLTFTSSATAGPETLCGAELVDALQFVCGDRGFYFNKPTGYGSSSRRAPQTGIVDECCFRSCDLRRLEMYCAPLKPAKSARSVRAQRHTDMPKTQKEVHLKNASRGSAGNKNYRM

SEQ ID NO: 224 - protein, 139 aa, Homo sapiens
LKVKMHTMSSSHLFYLALCLLTFTSSATAGPETLCGAELVDALQFVCGDRGFYFNKPTGYGSSSRRAPQTGIVDECCFRSCDLRRLEMYCAPLKPAKSARSVRAQRHTDMPKTQKYQPPSTNKNTKSQRRKGSTFEERK

SEQ ID NO: 225 - protein, 142 aa, Homo sapiens
MITPTVKMHTMSSSHLFYLALCLLTFTSSATAGPETLCGAELVDALQFVCGDRGFYFNKPTGYGSSSRRAPQTGIVDECCFRSCDLRRLEMYCAPLKPAKSARSVRAQRHTDMPKTQKYQPPSTNKNTKSQRRKGSTFEERK

SEQ ID NO: 226 - protein, 137 aa, Homo sapiens; identical to SEQ ID NO: 221

SEQ ID NO: 227 - protein, 195 aa, Homo sapiens; identical to SEQ ID NO: 220

SEQ ID NO: 228 - protein, 153 aa, Homo sapiens; identical to SEQ ID NO: 223

SEQ ID NO: 229 - protein, 108 aa, Homo sapiens
MGKISSLPTQLFKCCFCDFLKVKMHTMSSSHLFYLALCLLTFTSSATAGPETLCGAELVDALQFVCGDRGFYFSRKILLKLRSSVARCSGSLLKFQQFERPRQENCLS

SEQ ID NO: 230 - protein, 92 aa, Homo sapiens
MITPTVKMHTMSSSHLFYLALCLLTFTSSATAGPETLCGAELVDALQFVCGDRGFYFSRKILLKLRSSVARCSGSLLKFQQFERPRQENCLS

SEQ ID NO: 231 - DNA, 1738 bp, Homo sapiens
ggacctacaaggaggcaggcaagacagcaaggcatagagacaacatagagctaagtaaagccagtggaaatgaagagtcttccaatcctactgttgctgtgcgtggcagtttgctcagcctatccattggatggagctgcaaggggtgaggacaccagcatgaaccttgttcagaagttccttggattggaggtgacggggaagctggactccgacactctggaggtgatgcgcaagcccaggtgtggagttcctgacgttggtcacttcagaacctttcctggcatcccgaagtggaggaaaacccaccttacatacaggattgtgaattatacaccagatttgccaaaagatgctgttgattctgctgttgagaaagctctgaaagtctgggaagaggtgactccactcacattctccaggctgtatgaaggagaggctgatataatgatctcttttgcagttagagaacatggagacttttacccttttgatggacctggaaatgttttggcccatgcctatgcccctgggccagggattaatggagatgcccactttgatgatgatgaacaatggacaaaggatacaacagggaccaatttatttctcgttgctgctcatgaaattggccactccctgggtctctttcactcagccaacactgaagctttgatgtacccactctatcactcactcacagacctgactcggttccgcctgtctcaagatgatataaatggcattcagtccctctatggacctccccctgactcccctgagacccccctggtacccacggaacctgtccctccagaacctgggacgccagccaactgtgatcctgctttgtcctttgatgctgtcagcactctgaggggagaaatcctgatctttaaagacaggcacttttggcgcaaatccctcaggaagcttgaacctgaattgcatttgatctcttcattttggccatctcttccttcaggcgtggatgccgcatatgaagttactagcaaggacctcgttttcatttttaaaggaaatcaattctgggccatcagaggaaatgaggtacgagctggatacccaagaggcatccacaccctaggtttccctccaaccgtgaggaaaatcgatgcagccatttctgataaggaaaagaacaaaacatatttctttgtagaggacaaatactggagatttgatgagaagagaaattccatggagccaggctttcccaagcaaatagctgaagactttccagggattgactcaaagattgatgctgtttttgaagaatttgggttcttttatttctttactggatcttcacagttggagtttgacccaaatgcaaagaaagtgacacacactttgaagagtaacagctggcttaattgttgaaagagatatgtagaaggcacaatatgggcactttaaatgaagctaataattcttcacctaagtctctgtgaattgaaatgttcgttttctcctgcctgtgctgtgactcgagtcacactcaagggaacttgagcgtgaatctgtatcttgccggtcatttttatgttattacagggcattcaaatgggctgctgcttagcttgcaccttgtcacatagagtgatctttcccaagagaaggggaagcactcgtgtgcaacagacaagtgactgtatctgtgtagactatttgcttatttaataaagacgatttgtcagttattttaaaaaaaaat

SEQ ID NO: 232 - DNA, 174 bp, Artificial
  Synthetic oligonucleotide
ggacctacaaggaggcaggcaagacagcaaggcatagagacaacatagagctaagtaaagccagtggaaatgaagagtcttccaatcctactgttgctgtgcgtggcagtttgctcagcctatccattggatggagctgcaaggggtgaggacaccagcatgaaccttgttcag

SEQ ID NO: 233 - DNA, 146 bp, Artificial
  Synthetic oligonucleotide
aagttccttggattggaggtgacggggaagctggactccgacactctggaggtgatgcgcaagcccaggtgtggagttcctgacgttggtcacttcagaacctttcctggcatcccgaagtggaggaaaacccaccttacatacag

SEQ ID NO: 234 - DNA, 149 bp, Artificial
  Synthetic oligonucleotide
gattgtgaattatacaccagatttgccaaaagatgctgttgattctgctgttgagaaagctctgaaagtctgggaagaggtgactccactcacattctccaggctgtatgaaggagaggctgatataatgatctcttttgcagttagag

SEQ ID NO: 235 - DNA, 126 bp, Artificial
  Synthetic oligonucleotide
aacatggagacttttacccttttgatggacctggaaatgttttggcccatgcctatgcccctgggccagggattaatggagatgcccactttgatgatgatgaacaatggacaaaggatacaacag

SEQ ID NO: 236 - DNA, 135 bp, Artificial
  Synthetic oligonucleotide
ggaccaatttatttctcgttgctgctcatgaaattggccactccctgggtctctttcactcagccaacactgaagctttgatgtacccactctatcactcactcacagacctgactcggttccgcctgtctcaag

SEQ ID NO: 237 - DNA, 145 bp, Artificial
  Synthetic oligonucleotide
gacctccccctgactcccctgagacccccctggtacccacggaacctgtccctccagaacctgggacgccagccaactgtgatcctgctttgtcctttgatgctgtcagcactctgaggggagaaatcctgatctttaaagacag

SEQ ID NO: 238 - DNA, 134 bp, Artificial
  Synthetic oligonucleotide
gcacttttggcgcaaatccctcaggaagcttgaacctgaattgcatttgatctcttcattttggccatctcttccttcaggcgtggatgccgcatatgaagttactagcaaggacctcgttttcatttttaaag

SEQ ID NO: 239 - DNA, 160 bp, Artificial
  Synthetic oligonucleotide
gaaatcaattctgggccatcagaggaaatgaggtacgagctggatacccaagaggcatccacaccctaggtttccctccaaccgtgaggaaaatcgatgcagccatttctgataaggaaaagaacaaaacatatttctttgtagaggacaaatactggag

SEQ ID NO: 240 - DNA, 435 bp, Artificial
  Synthetic oligonucleotide
ggttcttttatttctttactggatcttcacagttggagtttgacccaaatgcaaagaaagtgacacacactttgaagagtaacagctggcttaattgttgaaagagatatgtagaaggcacaatatgggcactttaaatgaagctaataattcttcacctaagtctctgtgaattgaaatgttcgttttctcctgcctgtgctgtgactcgagtcacactcaagggaacttgagcgtgaatctgtatcttgccggtcatttttatgttattacagggcattcaaatgggctgctgcttagcttgcaccttgtcacatagagtgatctttcccaagagaaggggaagcactcgtgtgcaacagacaagtgactgtatctgtgtagactatttgcttatttaataaagacgatttgtcagttattttaaaaaaaaat

SEQ ID NO: 241 - DNA, 30 bp, Artificial
  Synthetic oligonucleotide
atgatataaatggcattcagtccctctatg

SEQ ID NO: 242 - DNA, 104 bp, Artificial
  Synthetic oligonucleotide
atttgatgagaagagaaattccatggagccaggctttcccaagcaaatagctgaagactttccagggattgactcaaagattgatgctgtttttgaagaatttg

SEQ ID NO: 243 - protein, 477 aa, Homo sapiens
MKSLPILLLLCVAVCSAYPLDGAARGEDTSMNLVQKYLENYYDLKKDVKQFVRRKDSGPVVKKIREMQKFLGLEVTGKLDSDTLEVMRKPRCGVPDVGHFRTFPGIPKWRKTHLTYRIVNYTPDLPKDAVDSAVEKALKVWEEVTPLTFSRLYEGEADIMISFAVREHGDFYPFDGPGNVLAHAYAPGPGINGDAHFDDDEQWTKDTTGTNLFLVAAHEIGHSLGLFHSANTEALMYPLYHSLTDLTRFRLSQDDINGIQSLYGPPPDSPETPLVPTEPVPPEPGTPANCDPALSFDAVSTLRGEILIFKDRHFWRKSLRKLEPELHLISSFWPSLPSGVDAAYEVTSKDLVFIFKGNQFWAIRGNEVRAGYPRGIHTLGFPPTVRKIDAAISDKEKNKTYFFVEDKYWRFDEKRNSMEPGFPKQIAEDFPGIDSKIDAVFEEFGFFYFFTGSSQLEFDPNAKKVTHTLKSNSWLNC

SEQ ID NO: 244 - protein, 444 aa, Homo sapiens
MKSLPILLLLCVAVCSAYPLDGAARGEDTSMNLVQKFLGLEVTGKLDSDTLEVMRKPRCGVPDVGHFRTFPGIPKWRKTHLTYRIVNYTPDLPKDAVDSAVEKALKVWEEVTPLTFSRLYEGEADIMISFAVREHGDFYPFDGPGNVLAHAYAPGPGINGDAHFDDDEQWTKDTTGTNLFLVAAHEIGHSLGLFHSANTEALMYPLYHSLTDLTRFRLSQDDINGIQSLYGPPPDSPETPLVPTEPVPPEPGTPANCDPALSFDAVSTLRGEILIFKDRHFWRKSLRKLEPELHLISSFWPSLPSGVDAAYEVTSKDLVFIFKGNQFWAIRGNEVRAGYPRGIHTLGFPPTVRKIDAAISDKEKNKTYFFVEDKYWRFDEKRNSMEPGFPKQIAEDFPGIDSKIDAVFEEFGFFYFFTGSSQLEFDPNAKKVTHTLKSNSWLNC

SEQ ID NO: 245 - DNA, 2616 bp, Homo sapiens
agcagctttagtcagacacctctgccctcaccatgagcctctggcagcccctggtcctggtgctcctggtgctgggctgctgctttgctgcccccagacagcgccagtccacccttgtgctcttccctggagacctgagaaccaatctcaccgacaggcagctggcagaggaatacctgtaccgctatggttacactcgggtggcagagatgcgtggagagtcgaaatctctggggcctgcgctgctgcttctccagaagcaactgtccctgcccgagaccggtgagctggatagcgccacgctgaaggccatgcgaaccccacggtgcggggtcccagacctgggcagattccaaacctttgagggcgacctcaagtggcaccaccacaacatcacctattggatccaaaactactcggaagacttgccgcgggcggtgattgacgacgcctttgcccgcgccttcgcactgtggagcgcggtgacgccgctcaccttcactcgcgtgtacagccgggacgcagacatcgtcatccagtttggtgtcgcggagcacggagacgggtatcccttcgacgggaaggacgggctcctggcacacgcctttcctcctggccccggcattcagggagacgcccatttcgacgatgacgagttgtggtccctgggcaagggcgtcgtggttccaactcggtttggaaacgcagatggcgcggcctgccacttccccttcatcttcgagggccgctcctactctgcctgcaccaccgacggtcgctccgacggcttgccctggtgcagtaccacggccaactacgacaccgacgaccggtttggcttctgccccagcgagagtgagtgagggggctcgccgagggctgggggcgcccaccacccttgatggtcctgggttctaattccagctctgccactagtgctgtgtggcctgcaattcaccctcccgcactctgggcccaattttctcatctgagaaatgatgagagatgggatgaactgcagaccatccatgggtcaaagaacaggacacacttgggggttataatgtgctgtctccgccttctccccctttcccacatcctcctcgccccaggactctacacccgggacggcaatgctgatgggaaaccctgccagtttccattcatcttccaaggccaatcctactccgcctgcaccacggacggtcgctccgacggctaccgctggtgcgccaccaccgccaactacgaccgggacaagctcttcggcttctgcccgacccgagctgactcgacggtgatggggggcaactcggcgggggagctgtgcgtcttccccttcactttcctgggtaaggagtactcgacctgtaccagcgagggccgcggagatgggcgcctctggtgcgctaccacctcgaactttgacagcgacaagaagtggggcttctgcccggaccaaggatacagtttgttcctcgtggcggcgcatgagttcggccacgcgctgggcttagatcattcctcagtgccggaggcgctcatgtaccctatgtaccgcttcactgaggggccccccttgcataaggacgacgtgaatggcatccggcacctctatggtcctcgccctgaacctgagccacggcctccaaccaccaccacaccgcagcccacggctcccccgacggtctgccccaccggaccccccactgtccacccctcagagcgccccacagctggccccacaggtcccccctcagctggccccacaggtccccccactgctggcccttctacggccactactgtgcctttgagtccggtggacgatgcctgcaacgtgaacatcttcgacgccatcgcggagattgggaaccagctgtatttgttcaaggatgggaagtactggcgattctctgagggcagggggagccggccgcagggccccttccttatcgccgacaagtggcccgcgctgccccgcaagctggactcggtctttgaggagccgctctccaagaagcttttcttcttctctgggcgccaggtgtgggtgtacacaggcgcgtcggtgctgggcccgaggcgtctggacaagctgggcctgggagccgacgtggcccaggtgaccggggccctccggagtggcagggggaagatgctgctgttcagcgggcggcgcctctggaggttcgacgtgaaggcgcagatggtggatccccggagcgccagcgaggtggaccggatgttccccggggtgcctttggacacgcacgacgtcttccagtaccgagagaaagcctatttctgccaggaccgcttctactggcgcgtgagttcccggagtgagttgaaccaggtggaccaagtgggctacgtgacctatgacatcctgcagtgccctgaggactagggctcccgtcctgctttggcagtgccatgtaaatccccactgggaccaaccctggggaaggagccagtttgccggatacaaactggtattctgttctggaggaaagggaggagtggaggtgggctgggccctctcttctcacctttgttttttgttggagtgtttctaataaacttggattctctaacctttaaaaaaaaact

SEQ ID NO: 246 - DNA, 2451 bp, Homo sapiens
agcagctttagtcagacacctctgccctcaccatgagcctctggcagcccctggtcctggtgctcctggtgctgggctgctgctttgctgcccccagacagcgccagtccacccttgtgctcttccctggagacctgagaaccaatctcaccgacaggcagctggcagaggaatacctgtaccgctatggttacactcgggtggcagagatgcgtggagagtcgaaatctctggggcctgcgctgctgcttctccagaagcaactgtccctgcccgagaccggtgagctggatagcgccacgctgaaggccatgcgaaccccacggtgcggggtcccagacctgggcagattccaaacctttgagggcgacctcaagtggcaccaccacaacatcacctattggatccaaaactactcggaagacttgccgcgggcggtgattgacgacgcctttgcccgcgccttcgcactgtggagcgcggtgacgccgctcaccttcactcgcgtgtacagccgggacgcagacatcgtcatccagtttggtgtcgcggagcacggagacgggtatcccttcgacgggaaggacgggctcctggcacacgcctttcctcctggccccggcattcagggagacgcccatttcgacgatgacgagttgtggtccctgggcaagggcgtcggtgagattctgagtcctcctggcccctgattcccttcattctctcccactcatcacccgccgccctaactccggtcccccctcctcctgcagtggttccaactcggtttggaaacgcagatggcgcggcctgccacttccccttcatcttcgagggccgctcctactctgcctgcaccaccgacggtcgctccgacggcttgccctggtgcagtaccacggccaactacgacaccgacgaccggtttggcttctgccccagcgagagactctacacccgggacggcaatgctgatgggaaaccctgccagtttccattcatcttccaaggccaatcctactccgcctgcaccacggacggtcgctccgacggctaccgctggtgcgccaccaccgccaactacgaccgggacaagctcttcggcttctgcccgacccgagctgactcgacggtgatggggggcaactcggcgggggagctgtgcgtcttccccttcactttcctgggtaaggagtactcgacctgtaccagcgagggccgcggagatgggcgcctctggtgcgctaccacctcgaactttgacagcgacaagaagtggggcttctgcccggaccaaggatacagtttgttcctcgtggcggcgcatgagttcggccacgcgctgggcttagatcattcctcagtgccggaggcgctcatgtaccctatgtaccgcttcactgaggggccccccttgcataaggacgacgtgaatggcatccggcacctctatggtcctcgccctgaacctgagccacggcctccaaccaccaccacaccgcagcccacggctcccccgacggtctgccccaccggaccccccactgtccacccctcagagcgccccacagctggccccacaggtcccccctcagctggccccacaggtccccccactgctggcccttctacggccactactgtgcctttgagtccggtggacgatgcctgcaacgtgaacatcttcgacgccatcgcggagattgggaaccagctgtatttgttcaaggatgggaagtactggcgattctctgagggcagggggagccggccgcagggccccttccttatcgccgacaagtggcccgcgctgccccgcaagctggactcggtctttgaggagccgctctccaagaagcttttcttcttctctgggcgccaggtgtgggtgtacacaggcgcgtcggtgctgggcccgaggcgtctggacaagctgggcctgggagccgacgtggcccaggtgaccggggccctccggagtggcagggggaagatgctgctgttcagcgggcggcgcctctggaggttcgacgtgaaggcgcagatggtggatccccggagcgccagcgaggtggaccggatgttccccggggtgcctttggacacgcacgacgtcttccagtaccgagagaaagcctatttctgccaggaccgcttctactggcgcgtgagttcccggagtgagttgaaccaggtggaccaagtgggctacgtgacctatgacatcctgcagtgccctgaggactagggctcccgtcctgctttggcagtgccatgtaaatccccactgggaccaaccctggggaaggagccagtttgccggatacaaactggtattctgttctggaggaaagggaggagtggaggtgggctgggccctctcttctcacctttgttttttgttggagtgtttctaataaacttggattctctaacctttaaaaaaaaact

SEQ ID NO: 247 - DNA, 2099 bp, Homo sapiens
agcagctttagtcagacacctctgccctcaccatgagcctctggcagcccctggtcctggtgctcctggtgctgggctgctgctttgctgcccccagacagcgccagtccacccttgtgctcttccctggagacctgagaaccaatctcaccgacaggcagctggcagaggaatacctgtaccgctatggttacactcgggtggcagagatgcgtggagagtcgaaatctctggggcctgcgctgctgcttctccagaagcaactgtccctgcccgagaccggtgagctggatagcgccacgctgaaggccatgcgaaccccacggtgcggggtcccagacctgggcagattccaaacctttgagggcgacctcaagtggcaccaccacaacatcacctattggatccaaaactactcggaagacttgccgcgggcggtgattgacgacgcctttgcccgcgccttcgcactgtggagcgcggtgacgccgctcaccttcactcgcgtgtacagccgggacgcagacatcgtcatccagtttggtgtcgcggagcacggagacgggtatcccttcgacgggaaggacgggctcctggcacacgcctttcctcctggccccggcattcagggagacgcccatttcgacgatgacgagttgtggtccctgggcaagggcgtcgtggttccaactcggtttggaaacgcagatggcgcggcctgccacttccccttcatcttcgagggccgctcctactctgcctgcaccaccgacggtcgctccgacggcttgccctggtgcagtaccacggccaactacgacaccgacgaccggtttggcttctgccccagcgagagactctacacccgggacggcaatgctgatgggaaaccctgccagtttccattcatcttccaaggccaatcctactccgcctgcaccacggacggtcgctccgacggctaccgctggtgcgccaccaccgccaactacgaccgggacaagctcttcggcttctgcccgacccgagctgactcgacggtgatggggggcaactcggcgggggagctgtgcgtcttccccttcactttcctgggtaaggagtcctcgccctgaacctgagccacggcctccaaccaccaccacaccgcagcccacggctcccccgacggtctgccccaccggaccccccactgtccacccctcagagcgccccacagctggccccacaggtcccccctcagctggccccacaggtccccccactgctggcccttctacggccactactgtgcctttgagtccggtggacgatgcctgcaacgtgaacatcttcgacgccatcgcggagattgggaaccagctgtatttgttcaaggatgggaagtactggcgattctctgagggcagggggagccggccgcagggccccttccttatcgccgacaagtggcccgcgctgccccgcaagctggactcggtctttgaggagccgctctccaagaagcttttcttcttctctgggcgccaggtgtgggtgtacacaggcgcgtcggtgctgggcccgaggcgtctggacaagctgggcctgggagccgacgtggcccaggtgaccggggccctccggagtggcagggggaagatgctgctgttcagcgggcggcgcctctggaggttcgacgtgaaggcgcagatggtggatccccggagcgccagcgaggtggaccggatgttccccggggtgcctttggacacgcacgacgtcttccagtaccgagagaaagcctatttctgccaggaccgcttctactggcgcgtgagttcccggagtgagttgaaccaggtggaccaagtgggctacgtgacctatgacatcctgcagtgccctgaggactagggctcccgtcctgctttggcagtgccatgtaaatccccactgggaccaaccctggggaaggagccagtttgccggatacaaactggtattctgttctggaggaaagggaggagtggaggtgggctgggccctctcttctcacctttgttttttgttggagtgtttctaataaacttggattctctaacctttaaaaaaaaact

SEQ ID NO: 248 - DNA, 170 bp, Artificial
  Synthetic oligonucleotide
agcagctttagtcagacacctctgccctcaccatgagcctctggcagcccctggtcctggtgctcctggtgctgggctgctgctttgctgcccccagacagcgccagtccacccttgtgctcttccctggagacctgagaaccaatctcaccgacaggcagctggcagag

SEQ ID NO: 249 - DNA, 233 bp, Artificial
  Synthetic oligonucleotide
gaatacctgtaccgctatggttacactcgggtggcagagatgcgtggagagtcgaaatctctggggcctgcgctgctgcttctccagaagcaactgtccctgcccgagaccggtgagctggatagcgccacgctgaaggccatgcgaaccccacggtgcggggtcccagacctgggcagattccaaacctttgagggcgacctcaagtggcaccaccacaacatcacctattg

SEQ ID NO: 250 - DNA, 149 bp, Artificial
  Synthetic oligonucleotide
gatccaaaactactcggaagacttgccgcgggcggtgattgacgacgcctttgcccgcgccttcgcactgtggagcgcggtgacgccgctcaccttcactcgcgtgtacagccgggacgcagacatcgtcatccagtttggtgtcgcgg

SEQ ID NO: 251 - DNA, 129 bp, Artificial
  Synthetic oligonucleotide
agcacggagacgggtatcccttcgacgggaaggacgggctcctggcacacgcctttcctcctggccccggcattcagggagacgcccatttcgacgatgacgagttgtggtccctgggcaagggcgtcg

SEQ ID NO: 252 - DNA, 257 bp, Artificial
  Synthetic oligonucleotide
gtgagtgagggggctcgccgagggctgggggcgcccaccacccttgatggtcctgggttctaattccagctctgccactagtgctgtgtggcctgcaattcaccctcccgcactctgggcccaattttctcatctgagaaatgatgagagatgggatgaactgcagaccatccatgggtcaaagaacaggacacacttgggggttataatgtgctgtctccgccttctccccctttcccacatcctcctcgccccag

SEQ ID NO: 253 - DNA, 156 bp, Artificial
  Synthetic oligonucleotide
gatacagtttgttcctcgtggcggcgcatgagttcggccacgcgctgggcttagatcattcctcagtgccggaggcgctcatgtaccctatgtaccgcttcactgaggggccccccttgcataaggacgacgtgaatggcatccggcacctctatg

SEQ ID NO: 254 - DNA, 159 bp, Artificial
  Synthetic oligonucleotide
agaaagcctatttctgccaggaccgcttctactggcgcgtgagttcccggagtgagttgaaccaggtggaccaagtgggctacgtgacctatgacatcctgcagtgccctgaggactagggctcccgtcctgctttggcagtgccatgtaaatccccac

SEQ ID NO: 255 - DNA, 163 bp, Artificial
  Synthetic oligonucleotide
tgggaccaaccctggggaaggagccagtttgccggatacaaactggtattctgttctggaggaaagggaggagtggaggtgggctgggccctctcttctcacctttgttttttgttggagtgtttctaataaacttggattctctaacctttaaaaaaaaact

SEQ ID NO: 256 - DNA, 92 bp, Artificial
  Synthetic oligonucleotide
gtgagattctgagtcctcctggcccctgattcccttcattctctcccactcatcacccgccgccctaactccggtcccccctcctcctgcag

SEQ ID NO: 257 - DNA, 55 bp, Artificial
  Synthetic oligonucleotide
tggttccaactcggtttggaaacgcagatggcgcggcctgccacttccccttcat

SEQ ID NO: 258 - DNA, 119 bp, Artificial
  Synthetic oligonucleotide
cttcgagggccgctcctactctgcctgcaccaccgacggtcgctccgacggcttgccctggtgcagtaccacggccaactacgacaccgacgaccggtttggcttctgccccagcgaga

SEQ ID NO: 259 - DNA, 55 bp, Artificial
  Synthetic oligonucleotide
gactctacacccgggacggcaatgctgatgggaaaccctgccagtttccattcat

SEQ ID NO: 260 - DNA, 119 bp, Artificial
  Synthetic oligonucleotide
cttccaaggccaatcctactccgcctgcaccacggacggtcgctccgacggctaccgctggtgcgccaccaccgccaactacgaccgggacaagctcttcggcttctgcccgacccgag

SEQ ID NO: 261 - DNA, 73 bp, Artificial
  Synthetic oligonucleotide
ctgactcgacggtgatggggggcaactcggcgggggagctgtgcgtcttccccttcactttcctgggtaagga

SEQ ID NO: 262 - DNA, 104 bp, Artificial
  Synthetic oligonucleotide
gtactcgacctgtaccagcgagggccgcggagatgggcgcctctggtgcgctaccacctcgaactttgacagcgacaagaagtggggcttctgcccggaccaag

SEQ ID NO: 263 - DNA, 44 bp, Artificial
  Synthetic oligonucleotide
gtcctcgccctgaacctgagccacggcctccaaccaccaccaca

SEQ ID NO: 264 - DNA, 19 bp, Artificial
  Synthetic oligonucleotide
ccgcagcccacggctcccc

SEQ ID NO: 265 - DNA, 98 bp, Artificial
  Synthetic oligonucleotide
cgacggtctgccccaccggaccccccactgtccacccctcagagcgccccacagctggccccacaggtcccccctcagctggccccacaggtcccccc

SEQ ID NO: 266 - DNA, 53 bp, Artificial
  Synthetic oligonucleotide
actgctggcccttctacggccactactgtgcctttgagtccggtggacgatgc

SEQ ID NO: 267 - DNA, 60 bp, Artificial
  Synthetic oligonucleotide
ctgcaacgtgaacatcttcgacgccatcgcggagattgggaaccagctgtatttgttcaa

SEQ ID NO: 268 - DNA, 6 bp, Artificial
  Synthetic oligonucleotide
ggatgg

SEQ ID NO: 269 - DNA, 109 bp, Artificial
  Synthetic oligonucleotide
gaagtactggcgattctctgagggcagggggagccggccgcagggccccttccttatcgccgacaagtggcccgcgctgccccgcaagctggactcggtctttgaggag

SEQ ID NO: 270 - DNA, 31 bp, Artificial
  Synthetic oligonucleotide
ccgctctccaagaagcttttcttcttctctg

SEQ ID NO: 271 - DNA, 119 bp, Artificial
  Synthetic oligonucleotide
ggcgccaggtgtgggtgtacacaggcgcgtcggtgctgggcccgaggcgtctggacaagctgggcctgggagccgacgtggcccaggtgaccggggccctccggagtggcagggggaag

SEQ ID NO: 272 - DNA, 32 bp, Artificial
  Synthetic oligonucleotide
atgctgctgttcagcgggcggcgcctctggag

SEQ ID NO: 273 - DNA, 52 bp, Artificial
  Synthetic oligonucleotide
gttcgacgtgaaggcgcagatggtggatccccggagcgccagcgaggtggac

SEQ ID NO: 274 - DNA, 52 bp, Artificial
  Synthetic oligonucleotide
cggatgttccccggggtgcctttggacacgcacgacgtcttccagtaccgag

SEQ ID NO: 275 - protein, 707 aa, Homo sapiens
MSLWQPLVLVLLVLGCCFAAPRQRQSTLVLFPGDLRTNLTDRQLAEEYLYRYGYTRVAEMRGESKSLGPALLLLQKQLSLPETGELDSATLKAMRTPRCGVPDLGRFQTFEGDLKWHHHNITYWIQNYSEDLPRAVIDDAFARAFALWSAVTPLTFTRVYSRDADIVIQFGVAEHGDGYPFDGKDGLLAHAFPPGPGIQGDAHFDDDELWSLGKGVVVPTRFGNADGAACHFPFIFEGRSYSACTTDGRSDGLPWCSTTANYDTDDRFGFCPSERLYTRDGNADGKPCQFPFIFQGQSYSACTTDGRSDGYRWCATTANYDRDKLFGFCPTRADSTVMGGNSAGELCVFPFTFLGKEYSTCTSEGRGDGRLWCATTSNFDSDKKWGFCPDQGYSLFLVAAHEFGHALGLDHSSVPEALMYPMYRFTEGPPLHKDDVNGIRHLYGPRPEPEPRPPTTTTPQPTAPPTVCPTGPPTVHPSERPTAGPTGPPSAGPTGPPTAGPSTATTVPLSPVDDACNVNIFDAIAEIGNQLYLFKDGKYWRFSEGRGSRPQGPFLIADKWPALPRKLDSVFEEPLSKKLFFFSGRQVWVYTGASVLGPRRLDKLGLGADVAQVTGALRSGRGKMLLFSGRRLWRFDVKAQMVDPRSASEVDRMFPGVPLDTHDVFQYREKAYFCQDRFYWRVSSRSELNQVDQVGYVTYDILQCPED

SEQ ID NO: 276 - protein, 360 aa, Homo sapiens
MSLWQPLVLVLLVLGCCFAAPRQRQSTLVLFPGDLRTNLTDRQLAEEYLYRYGYTRVAEMRGESKSLGPALLLLQKQLSLPETGELDSATLKAMRTPRCGVPDLGRFQTFEGDLKWHHHNITYWIQNYSEDLPRAVIDDAFARAFALWSAVTPLTFTRVYSRDADIVIQFGVAEHGDGYPFDGKDGLLAHAFPPGPGIQGDAHFDDDELWSLGKGVVVPTRFGNADGAACHFPFIFEGRSYSACTTDGRSDGLPWCSTTANYDTDDRFGFCPSERLYTRDGNADGKPCQFPFIFQGQSYSACTTDGRSDGYRWCATTANYDRDKLFGFCPTRADSTVMGGNSAGELCVFPFTFLGKESSP

SEQ ID NO: 277 - protein, 276 aa, Homo sapiens
MSLWQPLVLVLLVLGCCFAAPRQRQSTLVLFPGDLRTNLTDRQLAEEYLYRYGYTRVAEMRGESKSLGPALLLLQKQLSLPETGELDSATLKAMRTPRCGVPDLGRFQTFEGDLKWHHHNITYWIQNYSEDLPRAVIDDAFARAFALWSAVTPLTFTRVYSRDADIVIQFGVAEHGDGYPFDGKDGLLAHAFPPGPGIQGDAHFDDDELWSLGKGVVVPTRFGNADGAACHFPFIFEGRSYSACTTDGRSDGLPWCSTTANYDTDDRFGFCPSESE

SEQ ID NO: 278 - protein, 225 aa, Homo sapiens
MSLWQPLVLVLLVLGCCFAAPRQRQSTLVLFPGDLRTNLTDRQLAEEYLYRYGYTRVAEMRGESKSLGPALLLLQKQLSLPETGELDSATLKAMRTPRCGVPDLGRFQTFEGDLKWHHHNITYWIQNYSEDLPRAVIDDAFARAFALWSAVTPLTFTRVYSRDADIVIQFGVAEHGDGYPFDGKDGLLAHAFPPGPGIQGDAHFDDDELWSLGKGVGEILSPPGP

SEQ ID NO: 279 - DNA, 4341 bp, Homo sapiens
ggaggcgggggaaatatgcgtctctggatggccagtgactcgcagcccccttccccgataggaagggcctgcgcgtccggggacccttcgcttccccttctgctgcgcgacctccctggcccctcggagatctccatggcgacgccgcgcgcgccccacaacaggaaagccttaggcggcgcggcttggtgctcggagacttaagagtacccagcctcgacgtggtggatgtcgagtcttggggtcacacgcacaggcggtggccaagcaaacacccgctcatatttagtgcatgagcctgggttcgagttgccggagcctcgcgcgtagggcaggggttcgagcgccccttctccctgcctcgcctctgcgcctgggggctgctgcctcagtttcccagcgacaggcagggatttcgagcgtccccctcccctccctcgtcaagatccaagctagctgcctcagtttccccgcggagcctgggacgccagcggaggggctcggcgcgtagggatcacgcagcttccttcctttttctgggagctgtaaagacgcctccgcggccaaggccgaaaggggaagcgaggaggccgccggggtgagtgccctcgggtgtagagagaggacgccgatttccccggacgtggtgagaccgcgcttcgtcactcccacggttagcggtcgccgggaggtgcctggctctgctctggccgcttctcgagaaatgcccgtgtcagctaggtgtggacgtgacctagggggaggggcatccctcagtggagggagcccggggaggattcctgggcccccacccaggcagggggctcatccactcgattaaagaggcctgcgtaagctggagagggaggacttgagttcggaccccctcgcagcctggagtctcagtttaccgctttgtgaaatggacacaataacagtctccactctccggggaagttggcagtatttaaaagtacttaataaaccgcttagcgcggtgtagaccgtgattcaagcttagcctggccgggaaacgggaggcgtggaggccgggagcagcccccggggtcatcgccctgccaccgccgcccgattgctttagcttggaaattccggagctgaagcggccagcgagggaggatgaccctctcggcccgggcaccctgtcagtccggaaataactgcagcatttgttccggaggggaaggcgcgaggtttccgggaaagcagcaccgccccttggcccccaggtggctagcgctataaaggatcacgcgccccagtcgacgctgagctcctctgctactcagagttgcaacctcagcctcgctatggctcccagcagcccccggcccgcgctgcccgcactcctggtcctgctcggggctctgttcccaggacctggcaatgcccagacatctgtgtccccctcaaaagtcatcctgccccggggaggctccgtgctggtgacatgcagcacctcctgtgaccagcccaagttgttgggcatagagaccccgttgcctaaaaaggagttgctcctgcctgggaacaaccggaaggtgtatgaactgagcaatgtgcaagaagatagccaaccaatgtgctattcaaactgccctgatgggcagtcaacagctaaaaccttcctcaccgtgtactggactccagaacgggtggaactggcacccctcccctcttggcagccagtgggcaagaaccttaccctacgctgccaggtggagggtggggcaccccgggccaacctcaccgtggtgctgctccgtggggagaaggagctgaaacgggagccagctgtgggggagcccgctgaggtcacgaccacggtgctggtgaggagagatcaccatggagccaatttctcgtgccgcactgaactggacctgcggccccaagggctggagctgtttgagaacacctcggccccctaccagctccagacctttgtcctgccagcgactcccccacaacttgtcagcccccgggtcctagaggtggacacgcaggggaccgtggtctgttccctggacgggctgttcccagtctcggaggcccaggtccacctggcactgggggaccagaggttgaaccccacagtcacctatggcaacgactccttctcggccaaggcctcagtcagtgtgaccgcagaggacgagggcacccagcggctgacgtgtgcagtaatactggggaaccagagccaggagacactgcagacagtgaccatctacagtaagaaggggcaggggcggagtggggcttcttgggggtgtgacctgaacccggggcggggctcactgtgtgcctattccaggctttccggcgcccaacgtgattctgacgaagccagaggtctcagaagggaccgaggtgacagtgaagtgtgaggcccaccctagagccaaggtgacgctgaatggggttccagcccagccactgggcccgagggcccagctcctgctgaaggccaccccagaggacaacgggcgcagcttctcctgctctgcaaccctggaggtggccggccagcttatacacaagaaccagacccgggagcttcgtgtcctgtatggcccccgactggacgagagggattgtccgggaaactggacgtggccagaaaattcccagcagactccaatgtgccaggcttgggggaacccattgcccgagctcaagtgtctaaaggatggcactttcccactgcccatcggggaatcagtgactgtcactcgagatcttgagggcacctacctctgtcgggccaggagcactcaaggggaggtcacccgcaaggtgaccgtgaatgtgctctccccccggtatgagattgtcatcatcactgtggtagcagccgcagtcataatgggcactgcaggcctcagcacgtacctctataaccgccagcggaagatcaagaaatacagactacaacaggcccaaaaagggacccccatgaaaccgaacacacaagccacgcctccctgaacctatcccgggacagggcctcttcctcggccttcccatattggtggcagtggtgccacactgaacagagtggaagacatatgccatgcagctacacctaccggccctgggacgccggaggacagggcattgtcctcagtcagatacaacagcatttggggccatggtacctgcacacctaaaacactaggccacgcatctgatctgtagtcacatgactaagccaagaggaaggagcaagactcaagacatgattgatggatgttaaagtctagcctgatgagaggggaagtggtgggggagacatagccccaccatgaggacatacaactgggaaatactgaaacttgctgcctattgggtatgctgaggccccacagacttacagaagaagtggccctccatagacatgtgtagcatcaaaacacaaaggcccacacttcctgacggatgccagcttgggcactgctgtctactgaccccaacccttgatgatatgtatttattcatttgttattttaccagctatttattgagtgtcttttatgtaggctaaatgaacataggtctctggcctcacggagctcccagtcctaatcacattcaaggtcaccaggtacagttgtacaggttgtacactgcaggagagtgcctggcaaaaagatcaaatggggctgggacttctcattggccaacctgcctttccccagaaggagtgatttttctatcggcacaaaagcactatatggactggtaatggttacaggttcagagattacccagtgaggccttattcctcccttccccccaaaactgacacctttgttagccacctccccacccacatacatttctgccagtgttcacaatgacactcagcggtcatgtctggacatgagtgcccagggaatatgcccaagctatgccttgtcctcttgtcctgtttgcatttcactgggagcttgcactatgcagctccagtttcctgcagtgatcagggtcctgcaagcagtggggaagggggccaaggtattggaggactccctcccagctttggaagcctcatccgcgtgtgtgtgtgtgtgtatgtgtagacaagctctcgctctgtcacccaggctggagtgcagtggtgcaatcatggttcactgcagtcttgaccttttgggctcaagtgatcctcccacctcagcctcctgagtagctgggaccataggctcacaacaccacacctggcaaatttgattttttttttttttttccagagacggggtctcgcaacattgcccagacttcctttgtgttagttaataaagctttctcaactgc

SEQ ID NO: 280 - DNA, 4505 bp, Homo sapiens
ggaggcgggggaaatatgcgtctctggatggccagtgactcgcagcccccttccccgataggaagggcctgcgcgtccggggacccttcgcttccccttctgctgcgcgacctccctggcccctcggagatctccatggcgacgccgcgcgcgccccacaacaggaaagccttaggcggcgcggcttggtgctcggagacttaagagtacccagcctcgacgtggtggatgtcgagtcttggggtcacacgcacaggcggtggccaagcaaacacccgctcatatttagtgcatgagcctgggttcgagttgccggagcctcgcgcgtagggcaggggttcgagcgccccttctccctgcctcgcctctgcgcctgggggctgctgcctcagtttcccagcgacaggcagggatttcgagcgtccccctcccctccctcgtcaagatccaagctagctgcctcagtttccccgcggagcctgggacgccagcggaggggctcggcgcgtagggatcacgcagcttccttcctttttctgggagctgtaaagacgcctccgcggccaaggccgaaaggggaagcgaggaggccgccggggtgagtgccctcgggtgtagagagaggacgccgatttccccggacgtggtgagaccgcgcttcgtcactcccacggttagcggtcgccgggaggtgcctggctctgctctggccgcttctcgagaaatgcccgtgtcagctaggtgtggacgtgacctagggggaggggcatccctcagtggagggagcccggggaggattcctgggcccccacccaggcagggggctcatccactcgattaaagaggcctgcgtaagctggagagggaggacttgagttcggaccccctcgcagcctggagtctcagtttaccgctttgtgaaatggacacaataacagtctccactctccggggaagttggcagtatttaaaagtacttaataaaccgcttagcgcggtgtagaccgtgattcaagcttagcctggccgggaaacgggaggcgtggaggccgggagcagcccccggggtcatcgccctgccaccgccgcccgattgctttagcttggaaattccggagctgaagcggccagcgagggaggatgaccctctcggcccgggcaccctgtcagtccggaaataactgcagcatttgttccggaggggaaggcgcgaggtttccgggaaagcagcaccgccccttggcccccaggtggctagcgctataaaggatcacgcgccccagtcgacgctgagctcctctgctactcagagttgcaacctcagcctcgctatggctcccagcagcccccggcccgcgctgcccgcactcctggtcctgctcggggctctgttcccaggacctggcaatgcccagacatctgtgtccccctcaaaagtcatcctgccccggggaggctccgtgctggtgacatgcagcacctcctgtgaccagcccaagttgttgggcatagagaccccgttgcctaaaaaggagttgctcctgcctgggaacaaccggaaggtgtatgaactgagcaatgtgcaagaagatagccaaccaatgtgctattcaaactgccctgatgggcagtcaacagctaaaaccttcctcaccgtgtactggactccagaacgggtggaactggcacccctcccctcttggcagccagtgggcaagaaccttaccctacgctgccaggtggagggtggggcaccccgggccaacctcaccgtggtgctgctccgtggggagaaggagctgaaacgggagccagctgtgggggagcccgctgaggtcacgaccacggtgctggtgaggagagatcaccatggagccaatttctcgtgccgcactgaactggacctgcggccccaagggctggagctgtttgagaacacctcggccccctaccagctccagacctttggtgaggattgaagaagccagcagggagaaggtgggggtggggtatcctgcaatgcggtgcctgtggccacaggatcttttgagatgggtgtggccccggctaaggggtgcatgtgttctaggcgtatgtgacctaggctgctgagtggccctggaagaggatctcgcaggagggggaatgaaatgccccagagaagggcttcgggacgtccatccctgtctgctcacacctttcttctctccctagtcctgccagcgactcccccacaacttgtcagcccccgggtcctagaggtggacacgcaggggaccgtggtctgttccctggacgggctgttcccagtctcggaggcccaggtccacctggcactgggggaccagaggttgaaccccacagtcacctatggcaacgactccttctcggccaaggcctcagtcagtgtgaccgcagaggacgagggcacccagcggctgacgtgtgcagtaatactggggaaccagagccaggagacactgcagacagtgaccatctacagctttccggcgcccaacgtgattctgacgaagccagaggtctcagaagggaccgaggtgacagtgaagtgtgaggcccaccctagagccaaggtgacgctgaatggggttccagcccagccactgggcccgagggcccagctcctgctgaaggccaccccagaggacaacgggcgcagcttctcctgctctgcaaccctggaggtggccggccagcttatacacaagaaccagacccgggagcttcgtgtcctgtatggcccccgactggacgagagggattgtccgggaaactggacgtggccagaaaattcccagcagactccaatgtgccaggcttgggggaacccattgcccgagctcaagtgtctaaaggatggcactttcccactgcccatcggggaatcagtgactgtcactcgagatcttgagggcacctacctctgtcgggccaggagcactcaaggggaggtcacccgcaaggtgaccgtgaatgtgctctccccccggtatgagattgtcatcatcactgtggtagcagccgcagtcataatgggcactgcaggcctcagcacgtacctctataaccgccagcggaagatcaagaaatacagactacaacaggcccaaaaagggacccccatgaaaccgaacacacaagccacgcctccctgaacctatcccgggacagggcctcttcctcggccttcccatattggtggcagtggtgccacactgaacagagtggaagacatatgccatgcagctacacctaccggccctgggacgccggaggacagggcattgtcctcagtcagatacaacagcatttggggccatggtacctgcacacctaaaacactaggccacgcatctgatctgtagtcacatgactaagccaagaggaaggagcaagactcaagacatgattgatggatgttaaagtctagcctgatgagaggggaagtggtgggggagacatagccccaccatgaggacatacaactgggaaatactgaaacttgctgcctattgggtatgctgaggccccacagacttacagaagaagtggccctccatagacatgtgtagcatcaaaacacaaaggcccacacttcctgacggatgccagcttgggcactgctgtctactgaccccaacccttgatgatatgtatttattcatttgttattttaccagctatttattgagtgtcttttatgtaggctaaatgaacataggtctctggcctcacggagctcccagtcctaatcacattcaaggtcaccaggtacagttgtacaggttgtacactgcaggagagtgcctggcaaaaagatcaaatggggctgggacttctcattggccaacctgcctttccccagaaggagtgatttttctatcggcacaaaagcactatatggactggtaatggttacaggttcagagattacccagtgaggccttattcctcccttccccccaaaactgacacctttgttagccacctccccacccacatacatttctgccagtgttcacaatgacactcagcggtcatgtctggacatgagtgcccagggaatatgcccaagctatgccttgtcctcttgtcctgtttgcatttcactgggagcttgcactatgcagctccagtttcctgcagtgatcagggtcctgcaagcagtggggaagggggccaaggtattggaggactccctcccagctttggaagcctcatccgcgtgtgtgtgtgtgtgtatgtgtagacaagctctcgctctgtcacccaggctggagtgcagtggtgcaatcatggttcactgcagtcttgaccttttgggctcaagtgatcctcccacctcagcctcctgagtagctgggaccataggctcacaacaccacacctggcaaatttgattttttttttttttttccagagacggggtctcgcaacattgcccagacttcctttgtgttagttaataaagctttctcaactgc

SEQ ID NO: 281 - DNA, 4384 bp, Homo sapiens
ggaggcgggggaaatatgcgtctctggatggccagtgactcgcagcccccttccccgataggaagggcctgcgcgtccggggacccttcgcttccccttctgctgcgcgacctccctggcccctcggagatctccatggcgacgccgcgcgcgccccacaacaggaaagccttaggcggcgcggcttggtgctcggagacttaagagtacccagcctcgacgtggtggatgtcgagtcttggggtcacacgcacaggcggtggccaagcaaacacccgctcatatttagtgcatgagcctgggttcgagttgccggagcctcgcgcgtagggcaggggttcgagcgccccttctccctgcctcgcctctgcgcctgggggctgctgcctcagtttcccagcgacaggcagggatttcgagcgtccccctcccctccctcgtcaagatccaagctagctgcctcagtttccccgcggagcctgggacgccagcggaggggctcggcgcgtagggatcacgcagcttccttcctttttctgggagctgtaaagacgcctccgcggccaaggccgaaaggggaagcgaggaggccgccggggtgagtgccctcgggtgtagagagaggacgccgatttccccggacgtggtgagaccgcgcttcgtcactcccacggttagcggtcgccgggaggtgcctggctctgctctggccgcttctcgagaaatgcccgtgtcagctaggtgtggacgtgacctagggggaggggcatccctcagtggagggagcccggggaggattcctgggcccccacccaggcagggggctcatccactcgattaaagaggcctgcgtaagctggagagggaggacttgagttcggaccccctcgcagcctggagtctcagtttaccgctttgtgaaatggacacaataacagtctccactctccggggaagttggcagtatttaaaagtacttaataaaccgcttagcgcggtgtagaccgtgattcaagcttagcctggccgggaaacgggaggcgtggaggccgggagcagcccccggggtcatcgccctgccaccgccgcccgattgctttagcttggaaattccggagctgaagcggccagcgagggaggatgaccctctcggcccgggcaccctgtcagtccggaaataactgcagcatttgttccggaggggaaggcgcgaggtttccgggaaagcagcaccgccccttggcccccaggtggctagcgctataaaggatcacgcgccccagtcgacgctgagctcctctgctactcagagttgcaacctcagcctcgctatggctcccagcagcccccggcccgcgctgcccgcactcctggtcctgctcggggctctgttcccaggacctggcaatgcccagacatctgtgtccccctcaaaagtcatcctgccccggggaggctccgtgctggtgacatgcagcacctcctgtgaccagcccaagttgttgggcatagagaccccgttgcctaaaaaggagttgctcctgcctgggaacaaccggaaggtgtatgaactgagcaatgtgcaagaagatagccaaccaatgtgctattcaaactgccctgatgggcagtcaacagctaaaaccttcctcaccgtgtactggactccagaacgggtggaactggcacccctcccctcttggcagccagtgggcaagaaccttaccctacgctgccaggtggagggtggggcaccccgggccaacctcaccgtggtgctgctccgtggggagaaggagctgaaacgggagccagctgtgggggagcccgctgaggtcacgaccacggtgctggtgaggagagatcaccatggagccaatttctcgtgccgcactgaactggacctgcggccccaagggctggagctgtttgagaacacctcggccccctaccagctccagacctttgtcctgccagcgactcccccacaacttgtcagcccccgggtcctagaggtggacacgcaggggaccgtggtctgttccctggacgggctgttcccagtctcggaggcccaggtccacctggcactgggggaccagaggttgaaccccacagtcacctatggcaacgactccttctcggccaaggcctcagtcagtgtgaccgcagaggacgagggcacccagcggctgacgtgtgcagtaatactggggaaccagagccaggagacactgcagacagtgaccatctacagctttccggcgcccaacgtgattctgacgaagccagaggtctcagaagggaccgaggtgacagtgaagtgtgaggcccaccctagagccaaggtgacgctgaatggggttccagcccagccactgggcccgagggcccagctcctgctgaaggccaccccagaggacaacgggcgcagcttctcctgctctgcaaccctggaggtggccggccagcttatacacaagaaccagacccgggagcttcgtgtcctgtgtgagtggggctgctggtcaatggcccctatcccccaaggcccaatctccctgaaggtcccataaggtcttgcctccaagtcctgcccccacccacctccatgtcatctcatcgtgtttttccagatggcccccgactggacgagagggattgtccgggaaactggacgtggccagaaaattcccagcagactccaatgtgccaggcttgggggaacccattgcccgagctcaagtgtctaaaggatggcactttcccactgcccatcggggaatcagtgactgtcactcgagatcttgagggcacctacctctgtcgggccaggagcactcaaggggaggtcacccgcaaggtgaccgtgaatgtgctctccccccggtatgagattgtcatcatcactgtggtagcagccgcagtcataatgggcactgcaggcctcagcacgtacctctataaccgccagcggaagatcaagaaatacagactacaacaggcccaaaaagggacccccatgaaaccgaacacacaagccacgcctccctgaacctatcccgggacagggcctcttcctcggccttcccatattggtggcagtggtgccacactgaacagagtggaagacatatgccatgcagctacacctaccggccctgggacgccggaggacagggcattgtcctcagtcagatacaacagcatttggggccatggtacctgcacacctaaaacactaggccacgcatctgatctgtagtcacatgactaagccaagaggaaggagcaagactcaagacatgattgatggatgttaaagtctagcctgatgagaggggaagtggtgggggagacatagccccaccatgaggacatacaactgggaaatactgaaacttgctgcctattgggtatgctgaggccccacagacttacagaagaagtggccctccatagacatgtgtagcatcaaaacacaaaggcccacacttcctgacggatgccagcttgggcactgctgtctactgaccccaacccttgatgatatgtatttattcatttgttattttaccagctatttattgagtgtcttttatgtaggctaaatgaacataggtctctggcctcacggagctcccagtcctaatcacattcaaggtcaccaggtacagttgtacaggttgtacactgcaggagagtgcctggcaaaaagatcaaatggggctgggacttctcattggccaacctgcctttccccagaaggagtgatttttctatcggcacaaaagcactatatggactggtaatggttacaggttcagagattacccagtgaggccttattcctcccttccccccaaaactgacacctttgttagccacctccccacccacatacatttctgccagtgttcacaatgacactcagcggtcatgtctggacatgagtgcccagggaatatgcccaagctatgccttgtcctcttgtcctgtttgcatttcactgggagcttgcactatgcagctccagtttcctgcagtgatcagggtcctgcaagcagtggggaagggggccaaggtattggaggactccctcccagctttggaagcctcatccgcgtgtgtgtgtgtgtgtatgtgtagacaagctctcgctctgtcacccaggctggagtgcagtggtgcaatcatggttcactgcagtcttgaccttttgggctcaagtgatcctcccacctcagcctcctgagtagctgggaccataggctcacaacaccacacctggcaaatttgattttttttttttttttccagagacggggtctcgcaacattgcccagacttcctttgtgttagttaataaagctttctcaactgc

SEQ ID NO: 282 - DNA, 3995 bp, Homo sapiens
ggaggcgggggaaatatgcgtctctggatggccagtgactcgcagcccccttccccgataggaagggcctgcgcgtccggggacccttcgcttccccttctgctgcgcgacctccctggcccctcggagatctccatggcgacgccgcgcgcgccccacaacaggaaagccttaggcggcgcggcttggtgctcggagacttaagagtacccagcctcgacgtggtggatgtcgagtcttggggtcacacgcacaggcggtggccaagcaaacacccgctcatatttagtgcatgagcctgggttcgagttgccggagcctcgcgcgtagggcaggggttcgagcgccccttctccctgcctcgcctctgcgcctgggggctgctgcctcagtttcccagcgacaggcagggatttcgagcgtccccctcccctccctcgtcaagatccaagctagctgcctcagtttccccgcggagcctgggacgccagcggaggggctcggcgcgtagggatcacgcagcttccttcctttttctgggagctgtaaagacgcctccgcggccaaggccgaaaggggaagcgaggaggccgccggggtgagtgccctcgggtgtagagagaggacgccgatttccccggacgtggtgagaccgcgcttcgtcactcccacggttagcggtcgccgggaggtgcctggctctgctctggccgcttctcgagaaatgcccgtgtcagctaggtgtggacgtgacctagggggaggggcatccctcagtggagggagcccggggaggattcctgggcccccacccaggcagggggctcatccactcgattaaagaggcctgcgtaagctggagagggaggacttgagttcggaccccctcgcagcctggagtctcagtttaccgctttgtgaaatggacacaataacagtctccactctccggggaagttggcagtatttaaaagtacttaataaaccgcttagcgcggtgtagaccgtgattcaagcttagcctggccgggaaacgggaggcgtggaggccgggagcagcccccggggtcatcgccctgccaccgccgcccgattgctttagcttggaaattccggagctgaagcggccagcgagggaggatgaccctctcggcccgggcaccctgtcagtccggaaataactgcagcatttgttccggaggggaaggcgcgaggtttccgggaaagcagcaccgccccttggcccccaggtggctagcgctataaaggatcacgcgccccagtcgacgctgagctcctctgctactcagagttgcaacctcagcctcgctatggctcccagcagcccccggcccgcgctgcccgcactcctggtcctgctcggggctctgttcccagggactccagaacgggtggaactggcacccctcccctcttggcagccagtgggcaagaaccttaccctacgctgccaggtggagggtggggcaccccgggccaacctcaccgtggtgctgctccgtggggagaaggagctgaaacgggagccagctgtgggggagcccgctgaggtcacgaccacggtgctggtgaggagagatcaccatggagccaatttctcgtgccgcactgaactggacctgcggccccaagggctggagctgtttgagaacacctcggccccctaccagctccagacctttgtcctgccagcgactcccccacaacttgtcagcccccgggtcctagaggtggacacgcaggggaccgtggtctgttccctggacgggctgttcccagtctcggaggcccaggtccacctggcactgggggaccagaggttgaaccccacagtcacctatggcaacgactccttctcggccaaggcctcagtcagtgtgaccgcagaggacgagggcacccagcggctgacgtgtgcagtaatactggggaaccagagccaggagacactgcagacagtgaccatctacagctttccggcgcccaacgtgattctgacgaagccagaggtctcagaagggaccgaggtgacagtgaagtgtgaggcccaccctagagccaaggtgacgctgaatggggttccagcccagccactgggcccgagggcccagctcctgctgaaggccaccccagaggacaacgggcgcagcttctcctgctctgcaaccctggaggtggccggccagcttatacacaagaaccagacccgggagcttcgtgtcctgtatggcccccgactggacgagagggattgtccgggaaactggacgtggccagaaaattcccagcagactccaatgtgccaggcttgggggaacccattgcccgagctcaagtgtctaaaggatggcactttcccactgcccatcggggaatcagtgactgtcactcgagatcttgagggcacctacctctgtcgggccaggagcactcaaggggaggtcacccgcaaggtgaccgtgaatgtgctctccccccggtatgagattgtcatcatcactgtggtagcagccgcagtcataatgggcactgcaggcctcagcacgtacctctataaccgccagcggaagatcaagaaatacagactacaacaggcccaaaaagggacccccatgaaaccgaacacacaagccacgcctccctgaacctatcccgggacagggcctcttcctcggccttcccatattggtggcagtggtgccacactgaacagagtggaagacatatgccatgcagctacacctaccggccctgggacgccggaggacagggcattgtcctcagtcagatacaacagcatttggggccatggtacctgcacacctaaaacactaggccacgcatctgatctgtagtcacatgactaagccaagaggaaggagcaagactcaagacatgattgatggatgttaaagtctagcctgatgagaggggaagtggtgggggagacatagccccaccatgaggacatacaactgggaaatactgaaacttgctgcctattgggtatgctgaggccccacagacttacagaagaagtggccctccatagacatgtgtagcatcaaaacacaaaggcccacacttcctgacggatgccagcttgggcactgctgtctactgaccccaacccttgatgatatgtatttattcatttgttattttaccagctatttattgagtgtcttttatgtaggctaaatgaacataggtctctggcctcacggagctcccagtcctaatcacattcaaggtcaccaggtacagttgtacaggttgtacactgcaggagagtgcctggcaaaaagatcaaatggggctgggacttctcattggccaacctgcctttccccagaaggagtgatttttctatcggcacaaaagcactatatggactggtaatggttacaggttcagagattacccagtgaggccttattcctcccttccccccaaaactgacacctttgttagccacctccccacccacatacatttctgccagtgttcacaatgacactcagcggtcatgtctggacatgagtgcccagggaatatgcccaagctatgccttgtcctcttgtcctgtttgcatttcactgggagcttgcactatgcagctccagtttcctgcagtgatcagggtcctgcaagcagtggggaagggggccaaggtattggaggactccctcccagctttggaagcctcatccgcgtgtgtgtgtgtgtgtatgtgtagacaagctctcgctctgtcacccaggctggagtgcagtggtgcaatcatggttcactgcagtcttgaccttttgggctcaagtgatcctcccacctcagcctcctgagtagctgggaccataggctcacaacaccacacctggcaaatttgattttttttttttttttccagagacggggtctcgcaacattgcccagacttcctttgtgttagttaataaagctttctcaactgc

SEQ ID NO: 283 - DNA, 4470 bp, Homo sapiens
ggaggcgggggaaatatgcgtctctggatggccagtgactcgcagcccccttccccgataggaagggcctgcgcgtccggggacccttcgcttccccttctgctgcgcgacctccctggcccctcggagatctccatggcgacgccgcgcgcgccccacaacaggaaagccttaggcggcgcggcttggtgctcggagacttaagagtacccagcctcgacgtggtggatgtcgagtcttggggtcacacgcacaggcggtggccaagcaaacacccgctcatatttagtgcatgagcctgggttcgagttgccggagcctcgcgcgtagggcaggggttcgagcgccccttctccctgcctcgcctctgcgcctgggggctgctgcctcagtttcccagcgacaggcagggatttcgagcgtccccctcccctccctcgtcaagatccaagctagctgcctcagtttccccgcggagcctgggacgccagcggaggggctcggcgcgtagggatcacgcagcttccttcctttttctgggagctgtaaagacgcctccgcggccaaggccgaaaggggaagcgaggaggccgccggggtgagtgccctcgggtgtagagagaggacgccgatttccccggacgtggtgagaccgcgcttcgtcactcccacggttagcggtcgccgggaggtgcctggctctgctctggccgcttctcgagaaatgcccgtgtcagctaggtgtggacgtgacctagggggaggggcatccctcagtggagggagcccggggaggattcctgggcccccacccaggcagggggctcatccactcgattaaagaggcctgcgtaagctggagagggaggacttgagttcggaccccctcgcagcctggagtctcagtttaccgctttgtgaaatggacacaataacagtctccactctccggggaagttggcagtatttaaaagtacttaataaaccgcttagcgcggtgtagaccgtgattcaagcttagcctggccgggaaacgggaggcgtggaggccgggagcagcccccggggtcatcgccctgccaccgccgcccgattgctttagcttggaaattccggagctgaagcggccagcgagggaggatgaccctctcggcccgggcaccctgtcagtccggaaataactgcagcatttgttccggaggggaaggcgcgaggtttccgggaaagcagcaccgccccttggcccccaggtggctagcgctataaaggatcacgcgccccagtcgacgctgagctcctctgctactcagagttgcaacctcagcctcgctatggctcccagcagcccccggcccgcgctgcccgcactcctggtcctgctcggggctctgttcccaggacctggcaatgcccagacatctgtgtccccctcaaaagtcatcctgccccggggaggctccgtgctggtgacatgcagcacctcctgtgaccagcccaagttgttgggcatagagaccccgttgcctaaaaaggagttgctcctgcctgggaacaaccggaaggtgtatgaactgagcaatgtgcaagaagatagccaaccaatgtgctattcaaactgccctgatgggcagtcaacagctaaaaccttcctcaccgtgtactggactccagaacgggtggaactggcacccctcccctcttggcagccagtgggcaagaaccttaccctacgctgccaggtggagggtggggcaccccgggccaacctcaccgtggtgctgctccgtggggagaaggagctgaaacgggagccagctgtgggggagcccgctgaggtcacgaccacggtgctggtgaggagagatcaccatggagccaatttctcgtgccgcactgaactggacctgcggccccaagggctggagctgtttgagaacacctcggccccctaccagctccagacctttgtcctgccagcgactcccccacaacttgtcagcccccgggtcctagaggtggacacgcaggggaccgtggtctgttccctggacgggctgttcccagtctcggaggcccaggtccacctggcactgggggaccagaggttgaaccccacagtcacctatggcaacgactccttctcggccaaggcctcagtcagtgtgaccgcagaggacgagggcacccagcggctgacgtgtgcagtaatactggggaaccagagccaggagacactgcagacagtgaccatctacagctttccggcgcccaacgtgattctgacgaagccagaggtctcagaagggaccgaggtgacagtgaagtgtgaggcccaccctagagccaaggtgacgctgaatggggttccagcccagccactgggcccgagggcccagctcctgctgaaggccaccccagaggacaacgggcgcagcttctcctgctctgcaaccctggaggtggccggccagcttatacacaagaaccagacccgggagcttcgtgtcctgtgtgagtggggctgctggtcaatggcccctatcccccaaggcccaatctccctgaaggtcccataaggtcttgcctccaagtcctgcccccacccacctccatgtcatctcatcgtgtttttccagatggcccccgactggacgagagggattgtccgggaaactggacgtggccagaaaattcccagcagactccaatgtgccaggcttgggggaacccattgcccgagctcaagtgtctaaaggatggcactttcccactgcccatcggggaatcagtgactgtcactcgagatcttgagggcacctacctctgtcgggccaggagcactcaaggggaggtcacccgcaaggtgaccgtgaatgtgctctgtgagtgagccggcgggcagagctgggtgggggcaggggccatggacctaatgcaatcctcaccgcctgttgtatcctccccacagccccccggtatgagattgtcatcatcactgtggtagcagccgcagtcataatgggcactgcaggcctcagcacgtacctctataaccgccagcggaagatcaagaaatacagactacaacaggcccaaaaagggacccccatgaaaccgaacacacaagccacgcctccctgaacctatcccgggacagggcctcttcctcggccttcccatattggtggcagtggtgccacactgaacagagtggaagacatatgccatgcagctacacctaccggccctgggacgccggaggacagggcattgtcctcagtcagatacaacagcatttggggccatggtacctgcacacctaaaacactaggccacgcatctgatctgtagtcacatgactaagccaagaggaaggagcaagactcaagacatgattgatggatgttaaagtctagcctgatgagaggggaagtggtgggggagacatagccccaccatgaggacatacaactgggaaatactgaaacttgctgcctattgggtatgctgaggccccacagacttacagaagaagtggccctccatagacatgtgtagcatcaaaacacaaaggcccacacttcctgacggatgccagcttgggcactgctgtctactgaccccaacccttgatgatatgtatttattcatttgttattttaccagctatttattgagtgtcttttatgtaggctaaatgaacataggtctctggcctcacggagctcccagtcctaatcacattcaaggtcaccaggtacagttgtacaggttgtacactgcaggagagtgcctggcaaaaagatcaaatggggctgggacttctcattggccaacctgcctttccccagaaggagtgatttttctatcggcacaaaagcactatatggactggtaatggttacaggttcagagattacccagtgaggccttattcctcccttccccccaaaactgacacctttgttagccacctccccacccacatacatttctgccagtgttcacaatgacactcagcggtcatgtctggacatgagtgcccagggaatatgcccaagctatgccttgtcctcttgtcctgtttgcatttcactgggagcttgcactatgcagctccagtttcctgcagtgatcagggtcctgcaagcagtggggaagggggccaaggtattggaggactccctcccagctttggaagcctcatccgcgtgtgtgtgtgtgtgtatgtgtagacaagctctcgctctgtcacccaggctggagtgcagtggtgcaatcatggttcactgcagtcttgaccttttgggctcaagtgatcctcccacctcagcctcctgagtagctgggaccataggctcacaacaccacacctggcaaatttgattttttttttttttttccagagacggggtctcgcaacattgcccagacttcctttgtgttagttaataaagctttctcaactgc

SEQ ID NO: 284 - DNA, 3115 bp, Homo sapiens
ggaggcgggggaaatatgcgtctctggatggccagtgactcgcagcccccttccccgataggaagggcctgcgcgtccggggacccttcgcttccccttctgctgcgcgacctccctggcccctcggagatctccatggcgacgccgcgcgcgccccacaacaggaaagccttaggcggcgcggcttggtgctcggagacttaagagtacccagcctcgacgtggtggatgtcgagtcttggggtcacacgcacaggcggtggccaagcaaacacccgctcatatttagtgcatgagcctgggttcgagttgccggagcctcgcgcgtagggcaggggttcgagcgccccttctccctgcctcgcctctgcgcctgggggctgctgcctcagtttcccagcgacaggcagggatttcgagcgtccccctcccctccctcgtcaagatccaagctagctgcctcagtttccccgcggagcctgggacgccagcggaggggctcggcgcgtagggatcacgcagcttccttcctttttctgggagctgtaaagacgcctccgcggccaaggccgaaaggggaagcgaggaggccgccggggtgagtgccctcgggtgtagagagaggacgccgatttccccggacgtggtgagaccgcgcttcgtcactcccacggttagcggtcgccgggaggtgcctggctctgctctggccgcttctcgagaaatgcccgtgtcagctaggtgtggacgtgacctagggggaggggcatccctcagtggagggagcccggggaggattcctgggcccccacccaggcagggggctcatccactcgattaaagaggcctgcgtaagctggagagggaggacttgagttcggaccccctcgcagcctggagtctcagtttaccgctttgtgaaatggacacaataacagtctccactctccggggaagttggcagtatttaaaagtacttaataaaccgcttagcgcggtgtagaccgtgattcaagcttagcctggccgggaaacgggaggcgtggaggccgggagcagcccccggggtcatcgccctgccaccgccgcccgattgctttagcttggaaattccggagctgaagcggccagcgagggaggatgaccctctcggcccgggcaccctgtcagtccggaaataactgcagcatttgttccggaggggaaggcgcgaggtttccgggaaagcagcaccgccccttggcccccaggtggctagcgctataaaggatcacgcgccccagtcgacgctgagctcctctgctactcagagttgcaacctcagcctcgctatggctcccagcagcccccggcccgcgctgcccgcactcctggtcctgctcggggctctgttcccaggacctggcaatgcccagacatctgtgtccccctcaaaagtcatcctgccccggggaggctccgtgctggtgacatgcagcacctcctgtgaccagcccaagttgttgggcatagagaccccgttgcctaaaaaggagttgctcctgcctgggaacaaccggaaggtgtatgaactgagcaatgtgcaagaagatagccaaccaatgtgctattcaaactgccctgatgggcagtcaacagctaaaaccttcctcaccgtgtactggactccagaacgggtggaactggcacccctcccctcttggcagccagtgggcaagaaccttaccctacgctgccaggtggagggtggggcaccccgggccaacctcaccgtggtgctgctccgtggggagaaggagctgaaacgggagccagctgtgggggagcccgctgaggtcacgaccacggtgctggtgaggagagatcaccatggagccaatttctcgtgccgcactgaactggacctgcggccccaagggctggagctgtttgagaacacctcggccccctaccagctccagacctttgtcctgccagcgactcccccacaacttgtcagcccccgggtcctagaggtggacacgcaggggaccgtggtctgttccctggacgggctgttcccagtctcggaggcccaggtccacctggcactgggggaccagaggttgaaccccacagtcacctatggcaacgactccttctcggccaaggcctcagtcagtgtgaccgcagaggacgagggcacccagcggctgacgtgtgcagtaatactggggaaccagagccaggagacactgcagacagtgaccatctacagctttccggcgcccaacgtgattctgacgaagccagaggtctcagaagggaccgaggtgacagtgaagtgtgaggcccaccctagagccaaggtgacgctgaatggggttccagcccagccactgggcccgagggcccagctcctgctgaaggccaccccagaggacaacgggcgcagcttctcctgctctgcaaccctggaggtggccggccagcttatacacaagaaccagacccgggagcttcgtgtcctgtgtgagtggggctgctggtcaatggcccctatcccccaaggcccaatctccctgaaggtcccataaggtcttgcctccaagtcctgcccccacccacctccatgtcatctcatcgtgtttttccagatggcccccgactggacgagagggattgtccgggaaactggacgtggccagaaaattcccagcagactccaatgtgccaggcttgggggaacccattgcccgagctcaagtgtctaaaggatggcactttcccactgcccatcggggaatcagtgactgtcactcgagatcttgagggcacctacctctgtcgggccaggagcactcaaggggaggtcacccgcaaggtgaccgtgaatgtgctctgtgagtgagccggcgggcagagctgggtgggggcaggggccatggacctaatgcaatcctcaccgcctgttgtatcctccccacagccccccggtatgagattgtcatcatcactgtggtagcagccgcagtcataatgggcactgcaggcctcagcacgtacctctataaccgccagcggaagatcaagaaatacagactacaacaggcccaaaaagggacccccatgaaac

SEQ ID NO: 285 - DNA, 1398 bp, Artificial
  Synthetic oligonucleotide
ggaggcgggggaaatatgcgtctctggatggccagtgactcgcagcccccttccccgataggaagggcctgcgcgtccggggacccttcgcttccccttctgctgcgcgacctccctggcccctcggagatctccatggcgacgccgcgcgcgccccacaacaggaaagccttaggcggcgcggcttggtgctcggagacttaagagtacccagcctcgacgtggtggatgtcgagtcttggggtcacacgcacaggcggtggccaagcaaacacccgctcatatttagtgcatgagcctgggttcgagttgccggagcctcgcgcgtagggcaggggttcgagcgccccttctccctgcctcgcctctgcgcctgggggctgctgcctcagtttcccagcgacaggcagggatttcgagcgtccccctcccctccctcgtcaagatccaagctagctgcctcagtttccccgcggagcctgggacgccagcggaggggctcggcgcgtagggatcacgcagcttccttcctttttctgggagctgtaaagacgcctccgcggccaaggccgaaaggggaagcgaggaggccgccggggtgagtgccctcgggtgtagagagaggacgccgatttccccggacgtggtgagaccgcgcttcgtcactcccacggttagcggtcgccgggaggtgcctggctctgctctggccgcttctcgagaaatgcccgtgtcagctaggtgtggacgtgacctagggggaggggcatccctcagtggagggagcccggggaggattcctgggcccccacccaggcagggggctcatccactcgattaaagaggcctgcgtaagctggagagggaggacttgagttcggaccccctcgcagcctggagtctcagtttaccgctttgtgaaatggacacaataacagtctccactctccggggaagttggcagtatttaaaagtacttaataaaccgcttagcgcggtgtagaccgtgattcaagcttagcctggccgggaaacgggaggcgtggaggccgggagcagcccccggggtcatcgccctgccaccgccgcccgattgctttagcttggaaattccggagctgaagcggccagcgagggaggatgaccctctcggcccgggcaccctgtcagtccggaaataactgcagcatttgttccggaggggaaggcgcgaggtttccgggaaagcagcaccgccccttggcccccaggtggctagcgctataaaggatcacgcgccccagtcgacgctgagctcctctgctactcagagttgcaacctcagcctcgctatggctcccagcagcccccggcccgcgctgcccgcactcctggtcctgctcggggctctgttcccag

SEQ ID NO: 286 - DNA, 157 bp, Artificial
  Synthetic oligonucleotide
ctggtgacatgcagcacctcctgtgaccagcccaagttgttgggcatagagaccccgttgcctaaaaaggagttgctcctgcctgggaacaaccggaaggtgtatgaactgagcaatgtgcaagaagatagccaaccaatgtgctattcaaactgcc

SEQ ID NO: 287 - DNA, 306 bp, Artificial
  Synthetic oligonucleotide
ggactccagaacgggtggaactggcacccctcccctcttggcagccagtgggcaagaaccttaccctacgctgccaggtggagggtggggcaccccgggccaacctcaccgtggtgctgctccgtggggagaaggagctgaaacgggagccagctgtgggggagcccgctgaggtcacgaccacggtgctggtgaggagagatcaccatggagccaatttctcgtgccgcactgaactggacctgcggccccaagggctggagctgtttgagaacacctcggccccctaccagctccagacctttg

SEQ ID NO: 288 - DNA, 246 bp, Artificial
  Synthetic oligonucleotide
gtgaggattgaagaagccagcagggagaaggtgggggtggggtatcctgcaatgcggtgcctgtggccacaggatcttttgagatgggtgtggccccggctaaggggtgcatgtgttctaggcgtatgtgacctaggctgctgagtggccctggaagaggatctcgcaggagggggaatgaaatgccccagagaagggcttcgggacgtccatccctgtctgctcacacctttcttctctccctag

SEQ ID NO: 289 - DNA, 288 bp, Artificial
  Synthetic oligonucleotide
tcctgccagcgactcccccacaacttgtcagcccccgggtcctagaggtggacacgcaggggaccgtggtctgttccctggacgggctgttcccagtctcggaggcccaggtccacctggcactgggggaccagaggttgaaccccacagtcacctatggcaacgactccttctcggccaaggcctcagtcagtgtgaccgcagaggacgagggcacccagcggctgacgtgtgcagtaatactggggaaccagagccaggagacactgcagacagtgaccatctaca

SEQ ID NO: 290 - DNA, 125 bp, Artificial
  Synthetic oligonucleotide
gtgagtggggctgctggtcaatggcccctatcccccaaggcccaatctccctgaaggtcccataaggtcttgcctccaagtcctgcccccacccacctccatgtcatctcatcgtgtttttccag

SEQ ID NO: 291 - DNA, 227 bp, Artificial
  Synthetic oligonucleotide
atggcccccgactggacgagagggattgtccgggaaactggacgtggccagaaaattcccagcagactccaatgtgccaggcttgggggaacccattgcccgagctcaagtgtctaaaggatggcactttcccactgcccatcggggaatcagtgactgtcactcgagatcttgagggcacctacctctgtcgggccaggagcactcaaggggaggtcacccgcaag

SEQ ID NO: 292 - DNA, 147 bp, Artificial
  Synthetic oligonucleotide
ccccccggtatgagattgtcatcatcactgtggtagcagccgcagtcataatgggcactgcaggcctcagcacgtacctctataaccgccagcggaagatcaagaaatacagactacaacaggcccaaaaagggacccccatgaaac

SEQ ID NO: 293 - DNA, 132 bp, Artificial
  Synthetic oligonucleotide
cgaacacacaagccacgcctccctgaacctatcccgggacagggcctcttcctcggccttcccatattggtggcagtggtgccacactgaacagagtggaagacatatgccatgcagctacacctaccggcc

SEQ ID NO: 294 - DNA, 1067 bp, Artificial
  Synthetic oligonucleotide
ggcattgtcctcagtcagatacaacagcatttggggccatggtacctgcacacctaaaacactaggccacgcatctgatctgtagtcacatgactaagccaagaggaaggagcaagactcaagacatgattgatggatgttaaagtctagcctgatgagaggggaagtggtgggggagacatagccccaccatgaggacatacaactgggaaatactgaaacttgctgcctattgggtatgctgaggccccacagacttacagaagaagtggccctccatagacatgtgtagcatcaaaacacaaaggcccacacttcctgacggatgccagcttgggcactgctgtctactgaccccaacccttgatgatatgtatttattcatttgttattttaccagctatttattgagtgtcttttatgtaggctaaatgaacataggtctctggcctcacggagctcccagtcctaatcacattcaaggtcaccaggtacagttgtacaggttgtacactgcaggagagtgcctggcaaaaagatcaaatggggctgggacttctcattggccaacctgcctttccccagaaggagtgatttttctatcggcacaaaagcactatatggactggtaatggttacaggttcagagattacccagtgaggccttattcctcccttccccccaaaactgacacctttgttagccacctccccacccacatacatttctgccagtgttcacaatgacactcagcggtcatgtctggacatgagtgcccagggaatatgcccaagctatgccttgtcctcttgtcctgtttgcatttcactgggagcttgcactatgcagctccagtttcctgcagtgatcagggtcctgcaagcagtggggaagggggccaaggtattggaggactccctcccagctttggaagcctcatccgcgtgtgtgtgtgtgtgtatgtgtagacaagctctcgctctgtcacccaggctggagtgcagtggtgcaatcatggttcactgcagtcttgaccttttgggctcaagtgatcctcccacctcag

SEQ ID NO: 295 - DNA, 133 bp, Artificial
  Synthetic oligonucleotide
ctgagtagctgggaccataggctcacaacaccacacctggcaaatttgattttttttttttttttccagagacggggtctcgcaacattgcccagacttcctttgtgttagttaataaagctttctcaactgc

SEQ ID NO: 296 - DNA, 65 bp, Artificial
  Synthetic oligonucleotide
gacctggcaatgcccagacatctgtgtccccctcaaaagtcatcctgccccggggaggctccgtg

SEQ ID NO: 297 - DNA, 42 bp, Artificial
  Synthetic oligonucleotide
ctgatgggcagtcaacagctaaaaccttcctcaccgtgtact

SEQ ID NO: 298 - DNA, 82 bp, Artificial
  Synthetic oligonucleotide
gtaagaaggggcaggggcggagtggggcttcttgggggtgtgacctgaacccggggcggggctcactgtgtgcctattccag

SEQ ID NO: 299 - DNA, 119 bp, Artificial
  Synthetic oligonucleotide
gctttccggcgcccaacgtgattctgacgaagccagaggtctcagaagggaccgaggtgacagtgaagtgtgaggcccaccctagagccaaggtgacgctgaatggggttccagcccag

SEQ ID NO: 300 - DNA, 21 bp, Artificial
  Synthetic oligonucleotide
ccactgggcccgagggcccag

SEQ ID NO: 301 - DNA, 90 bp, Artificial
  Synthetic oligonucleotide
ctcctgctgaaggccaccccagaggacaacgggcgcagcttctcctgctctgcaaccctggaggtggccggccagcttatacacaagaac

SEQ ID NO: 302 - DNA, 25 bp, Artificial
  Synthetic oligonucleotide
cagacccgggagcttcgtgtcctgt

SEQ ID NO: 303 - DNA, 19 bp, Artificial
  Synthetic oligonucleotide
gtgaccgtgaatgtgctct

SEQ ID NO: 304 - DNA, 86 bp, Artificial
  Synthetic oligonucleotide
gtgagtgagccggcgggcagagctgggtgggggcaggggccatggacctaatgcaatcctcaccgcctgttgtatcctccccacag

SEQ ID NO: 305 - DNA, 19 bp, Artificial
  Synthetic oligonucleotide
ctgggacgccggaggacag

SEQ ID NO: 306 - DNA, 4 bp, Artificial
  Synthetic oligonucleotide
cctc

SEQ ID NO: 307 - protein, 532 aa, Homo sapiens
MAPSSPRPALPALLVLLGALFPGPGNAQTSVSPSKVILPRGGSVLVTCSTSCDQPKLLGIETPLPKKELLLPGNNRKVYELSNVQEDSQPMCYSNCPDGQSTAKTFLTVYWTPERVELAPLPSWQPVGKNLTLRCQVEGGAPRANLTVVLLRGEKELKREPAVGEPAEVTTTVLVRRDHHGANFSCRTELDLRPQGLELFENTSAPYQLQTFVLPATPPQLVSPRVLEVDTQGTVVCSLDGLFPVSEAQVHLALGDQRLNPTVTYGNDSFSAKASVSVTAEDEGTQRLTCAVILGNQSQETLQTVTIYSFPAPNVILTKPEVSEGTEVTVKCEAHPRAKVTLNGVPAQPLGPRAQLLLKATPEDNGRSFSCSATLEVAGQLIHKNQTRELRVLYGPRLDERDCPGNWTWPENSQQTPMCQAWGNPLPELKCLKDGTFPLPIGESVTVTRDLEGTYLCRARSTQGEVTREVTVNVLSPRYEIVIITVVAAAVIMGTAGLSTYLYNRQRKIKKYRLQQAQKGTPMKPNTQATPP

SEQ ID NO: 308 - protein, 532 aa, Homo sapiens
MAPSSPRPALPALLVLLGALFPGPGNAQTSVSPSKVILPRGGSVLVTCSTSCDQPKLLGIETPLPKKELLLPGNNRKVYELSNVQEDSQPMCYSNCPDGQSTAKTFLTVYWTPERVELAPLPSWQPVGKNLTLRCQVEGGAPRANLTVVLLRGEKELKREPAVGEPAEVTTTVLVRRDHHGANFSCRTELDLRPQGLELFENTSAPYQLQTFVLPATPPQLVSPRVLEVDTQGTVVCSLDGLFPVSEAQVHLALGDQRLNPTVTYGNDSFSAKASVSVTAEDEGTQRLTCAVILGNQSQETLQTVTIYSFPAPNVILTKPEVSEGTEVTVKCEAHPRAKVTLNGVPAQPLGPRAQLLLKATPEDNGRSFSCSATLEVAGQLIHKNQTRELRVLYGPRLDERDCPGNWTWPENSQQTPMCQAWGNPLPELKCLKDGTFPLPIGESVTVTRDLEGTYLCRARSTQGEVTRKVTVNVLSPRYEIVIITVVAAAVIMGTAGLSTYLYNRQRKIKKYRLQQAQKGTPMKPNTQATPP

SEQ ID NO: 309 - protein, 359 aa, Homo sapiens
MAPSSPRPALPALLVLLGALFPGPGNAQTSVSPSKVILPRGGSVLVTCSTSCDQPKLLGIETPLPKKELLLPGNNRKVYELSNVQEDSQPMCYSNCPDGQSTAKTFLTVYWTPERVELAPLPSWQPVGKNLTLRCQVEGGAPRANLTVVLLRGEKELKREPAVGEPAEVTTTVLVRRDHHGANFSCRTELDLRPQGLELFENTSAPYQLQTFVLPATPPQLVSPRVLEVDTQGTVVCSLDGLFPVSEAQVHLALGDQRLNPTVTYGNDSFSAKASVSVTAEDEGTQRLTCAVILGNQSQETLQTVTIYSKKGQGRSGASWGCDLNPGRGSLCAYSRLSGAQRDSDEARGLRRDRGDSEV

SEQ ID NO: 310 - protein, 414 aa, Homo sapiens
MAPSSPRPALPALLVLLGALFPGPGNAQTSVSPSKVILPRGGSVLVTCSTSCDQPKLLGIETPLPKKELLLPGNNRKVYELSNVQEDSQPMCYSNCPDGQSTAKTFLTVYWTPERVELAPLPSWQPVGKNLTLRCQVEGGAPRANLTVVLLRGEKELKREPAVGEPAEVTTTVLVRRDHHGANFSCRTELDLRPQGLELFENTSAPYQLQTFVLPATPPQLVSPRVLEVDTQGTVVCSLDGLFPVSEAQVHLALGDQRLNPTVTYGNDSFSAKASVSVTAEDEGTQRLTCAVILGNQSQETLQTVTIYSFPAPNVILTKPEVSEGTEVTVKCEAHPRAKVTLNGVPAQPLGPRAQLLLKATPEDNGRSFSCSATLEVAGQLIHKNQTRELRVLCEWGCWSMAPIPQGPISLKVP

SEQ ID NO: 311 - protein, 444 aa, Homo sapiens
MAPSSPRPALPALLVLLGALFPGTPERVELAPLPSWQPVGKNLTLRCQVEGGAPRANLTVVLLRGEKELKREPAVGEPAEVTTTVLVRRDHHGANFSCRTELDLRPQGLELFENTSAPYQLQTFVLPATPPQLVSPRVLEVDTQGTVVCSLDGLFPVSEAQVHLALGDQRLNPTVTYGNDSFSAKASVSVTAEDEGTQRLTCAVILGNQSQETLQTVTIYSFPAPNVILTKPEVSEGTEVTVKCEAHPRAKVTLNGVPAQPLGPRAQLLLKATPEDNGRSFSCSATLEVAGQLIHKNQTRELRVLYGPRLDERDCPGNWTWPENSQQTPMCQAWGNPLPELKCLKDGTFPLPIGESVTVTRDLEGTYLCRARSTQGEVTRKVTVNVLSPRYEIVIITVVAAAVIMGTAGLSTYLYNRQRKIKKYRLQQAQKGTPMKPNTQATPP

SEQ ID NO: 312 - protein, 215 aa, Homo sapiens
MAPSSPRPALPALLVLLGALFPGPGNAQTSVSPSKVILPRGGSVLVTCSTSCDQPKLLGIETPLPKKELLLPGNNRKVYELSNVQEDSQPMCYSNCPDGQSTAKTFLTVYWTPERVELAPLPSWQPVGKNLTLRCQVEGGAPRANLTVVLLRGEKELKREPAVGEPAEVTTTVLVRRDHHGANFSCRTELDLRPQGLELFENTSAPYQLQTFGED

SEQ ID NO: 313 - DNA, 3069 bp, Homo sapiens
cggggcgggcccagtgcgtggcagcgggacctgcggccccgtcgcgaagtttccagccctgcgagcgccgccgggtcggccgatcgtcccccatacctcggccatgcggcccctgctgctactggccctgctgggctggctgctgctggccgaagcgaagggcgacgccaagccggaggacaaccttttagtcctcacggtggccactaaggagaccgagggattccgtcgcttcaagcgctcagctcagttcttcaactacaagatccaggcgcttggcctaggggaggactggaatgtggagaaggggacgtcggcaggtggagggcagaaggtccggctgctgaagaaagctctggagaagcacgcagacaaggaggatctggtcattctcttcgcagacagctatgacgtgctgtttgcatcggggccccgggagctcctgaagaagttccggcaggccaggagccaggtggtcttctctgctgaggagctcatctacccagaccgcaggctggagaccaagtatccggtggtgtccgatggcaagaggttcctgggctctggaggcttcatcggttatgcccccaacctcagcaaactggtggccgagtgggagggccaggacagcgacagcgatcagctgttttacaccaagatcttcttggacccggagaagagggagcagatcaatatcaccctggaccaccgctgccgtatcttccagaacctggatggagccttggatgaggtcgtgctcaagtttgaaatgggccatgtgagagcgaggaacctggcctatgacaccctcccggtcctgatccatggcaacgggccaaccaagctgcagttgaactacctgggcaactacatcccgcgcttctggaccttcgaaacaggctgcaccgtgtgtgacgaaggcttgcgcagcctcaagggcattggggatgaagctctgcccacggtcctggtcggcgtgttcatcgaacagcccacgccgtttgtgtccctgttcttccagcggctcctgcggctccactacccccagaaacacatgcgacttttcatccacaaccacgagcagcaccacaaggctcaggtggaagagttcctggcacagcatggcagcgagtaccagtctgtgaagctggtgggccctgaggtgcggatggcgaatgcagatgccaggaacatgggcgcagacctgtgccggcaggaccgcagctgcacctactacttcagcgtggatgctgacgtggccctgaccgagcccaacagcctgcggctgctgatccaacagaacaagaacgtcattgccccgctgatgacccggcatgggaggctgtggtcgaacttctggggggctctcagtgcagatggctactatgcccgttccgaggactacgtggacattgtgcaggggcggcgtgttggtgtctggaatgtgccctatatttcaaacatctacttgatcaagggcagtgccctgcggggtgagctgcagtcctcagatctcttccaccacagcaagctggaccccgacatggccttctgtgccaacatccggcagcaggtcagccaggagcgggcagcacaggacgccctctggatggggcaggcgggaaggatgtgttcatgttcctgaccaaccggcacacccttggccatctgctctccctagacagctaccgcaccacccacctgcacaacgacctctgggaggtgttcagcaaccccgaggactggaaggagaagtacatccaccagaactacaccaaagccctggcagggaagctggtggagacgccctgcccggatgtctattggttccccatcttcacggaggtggcctgtgatgagctggtggaggagatggagcactttggccagtggtctctgggcaacaacaaggacaaccgcatccagggtggctacgagaacgtgccgactattgacatccacatgaaccagatcggctttgagcgggagtggcacaaattcctgctggagtacattgcgcccatgacggagaagctctaccccggctactacaccagggcccagtttgacctggcctttgtcgtccgctacaagcctgatgagcagccctcactgatgccacaccatgatgcctccaccttcaccatcaacatcgccctgaaccgagtcggggtggattacgagggcgggggctgtcggttcctgcgctacaactgttccatccgagccccaaggaagggctggaccctcatgcaccctggacgactcacgcattaccatgaggggctccccaccaccaggggcacccgctacatcgcagtctccttcgtcgatccctaattggccaggcctgaccctcttggacctttcttctttgccgacaaccactgcccagcagcctctgggacctcggggtcccagggaacccagtccagcctcctggctgttgacttcccattgctcttggagccaccaatcaaagagattcaaagagattcctgcaggccagaggcggaacacacctttatggctggggctctccgtggtgttctggacccagcccctggagacaccattcacttttactgctttgtagtgactcgtgctctccaacctgtcttcctgaaaaaccaaggcccccttcccccacctcttccatggggtgagacttgagcagaacaggggcttccccaagttgcccagaaagactgtctgggtgagaagccatggccagagcttctcccaggcacaggtgttgcaccagggacttctgcttcaagttttggggtaaagacacctggatcagactccaagggctgccctgagtctgggacttctgcctccatggctggtcatgagagcaaaccgtagtcccctggagacagcgactccagagaacctcttgggagacagaagaggcatctgtgcacagctcgatcttctacttgcctgtggggaggggagtgacaggtccacacaccacactgggtcaccctgtcctggatgcctctgaagagagggacagaccgtcagaaactggagagtttctattaaaggtcatttaaacca

SEQ ID NO: 314 - DNA, 3157 bp, Homo sapiens
cggggcgggcccagtgcgtggcagcgggacctgcggccccgtcgcgaagtttccagccctgcgagcgccgccgggtcggccgatcgtcccccatacctcggccatgcggcccctgctgctactggccctgctgggctggctgctgctggccgaagcgaagggcgacgccaagccggaggccccctgttgccaagagggcctcagagctggtggctctggttctcttcacctggggagagacttcaccgtcctggcaggagctcgggggagcccttccccaagtgtgagcagcatccctcgtttctggatcccaggttcagacaaccttttagtcctcacggtggccactaaggagaccgagggattccgtcgcttcaagcgctcagctcagttcttcaactacaagatccaggcgcttggcctaggggaggactggaatgtggagaaggggacgtcggcaggtggagggcagaaggtccggctgctgaagaaagctctggagaagcacgcagacaaggaggatctggtcattctcttcgcagacagctatgacgtgctgtttgcatcggggccccgggagctcctgaagaagttccggcaggccaggagccaggtggtcttctctgctgaggagctcatctacccagaccgcaggctggagaccaagtatccggtggtgtccgatggcaagaggttcctgggctctggaggcttcatcggttatgcccccaacctcagcaaactggtggccgagtgggagggccaggacagcgacagcgatcagctgttttacaccaagatcttcttggacccggagaagagggagcagatcaatatcaccctggaccaccgctgccgtatcttccagaacctggatggagccttggatgaggtcgtgctcaagtttgaaatgggccatgtgagagcgaggaacctggcctatgacaccctcccggtcctgatccatggcaacgggccaaccaagctgcagttgaactacctgggcaactacatcccgcgcttctggaccttcgaaacaggctgcaccgtgtgtgacgaaggcttgcgcagcctcaagggcattggggatgaagctctgcccacggtcctggtcggcgtgttcatcgaacagcccacgccgtttgtgtccctgttcttccagcggctcctgcggctccactacccccagaaacacatgcgacttttcatccacaaccacgagcagcaccacaaggctcaggtggaagagttcctggcacagcatggcagcgagtaccagtctgtgaagctggtgggccctgaggtgcggatggcgaatgcagatgccaggaacatgggcgcagacctgtgccggcaggaccgcagctgcacctactacttcagcgtggatgctgacgtggccctgaccgagcccaacagcctgcggctgctgatccaacagaacaagaacgtcattgccccgctgatgacccggcatgggaggctgtggtcgaacttctggggggctctcagtgcagatggctactatgcccgttccgaggactacgtggacattgtgcaggggcggcgtgttggtgtctggaatgtgccctatatttcaaacatctacttgatcaagggcagtgccctgcggggtgagctgcagtcctcagatctcttccaccacagcaagctggaccccgacatggccttctgtgccaacatccggcagcaggatgtgttcatgttcctgaccaaccggcacacccttggccatctgctctccctagacagctaccgcaccacccacctgcacaacgacctctgggaggtgttcagcaaccccgaggactggaaggagaagtacatccaccagaactacaccaaagccctggcagggaagctggtggagacgccctgcccggatgtctattggttccccatcttcacggaggtggcctgtgatgagctggtggaggagatggagcactttggccagtggtctctgggcaacaacaaggacaaccgcatccagggtggctacgagaacgtgccgactattgacatccacatgaaccagatcggctttgagcgggagtggcacaaattcctgctggagtacattgcgcccatgacggagaagctctaccccggctactacaccagggcccagtttgacctggcctttgtcgtccgctacaagcctgatgagcagccctcactgatgccacaccatgatgcctccaccttcaccatcaacatcgccctgaaccgagtcggggtggattacgagggcgggggctgtcggttcctgcgctacaactgttccatccgagccccaaggaagggctggaccctcatgcaccctggacgactcacgcattaccatgaggggctccccaccaccaggggcacccgctacatcgcagtctccttcgtcgatccctaattggccaggcctgaccctcttggacctttcttctttgccgacaaccactgcccagcagcctctgggacctcggggtcccagggaacccagtccagcctcctggctgttgacttcccattgctcttggagccaccaatcaaagagattcaaagagattcctgcaggccagaggcggaacacacctttatggctggggctctccgtggtgttctggacccagcccctggagacaccattcacttttactgctttgtagtgactcgtgctctccaacctgtcttcctgaaaaaccaaggcccccttcccccacctcttccatggggtgagacttgagcagaacaggggcttccccaagttgcccagaaagactgtctgggtgagaagccatggccagagcttctcccaggcacaggtgttgcaccagggacttctgcttcaagttttggggtaaagacacctggatcagactccaagggctgccctgagtctgggacttctgcctccatggctggtcatgagagcaaaccgtagtcccctggagacagcgactccagagaacctcttgggagacagaagaggcatctgtgcacagctcgatcttctacttgcctgtggggaggggagtgacaggtccacacaccacactgggtcaccctgtcctggatgcctctgaagagagggacagaccgtcagaaactggagagtttctattaaaggtcatttaaacca

SEQ ID NO: 315 - DNA, 2941 bp, Homo sapiens
cggggcgggcccagtgcgtggcagcgggacctgcggccccgtcgcgaagtttccagccctgcgagcgccgccgggtcggccgatcgtcccccatacctcggccatgcggcccctgctgctactggccctgctgggctggctgctgctggccgaagcgaagggcgacgccaagccggaggacaaccttttagtcctcacggtggccactaaggagaccgagggattccgtcgcttcaagcgctcagctcagttcttcaactacaagatccaggcgcttggcctaggggaggactggaatgtggagaaggggacgtcggcaggtggagggcagaaggtccggctgctgaagaaagctctggagaagcacgcagacaaggaggatctggtcattctcttcgcagacagctatgacgtgctgtttgcatcggggccccgggagctcctgaagaagttccggcaggccaggagccaggtggtcttctctgctgaggagctcatctacccagaccgcaggctggagaccaagtatccggtggtgtccgatggcaagaggttcctgggctctggaggcttcatcggttatgcccccaacctcagcaaactggtggccgagtgggagggccaggacagcgacagcgatcagctgttttacaccaagatcttcttggacccggagaagagggagcagatcaatatcaccctggaccaccgctgccgtatcttccagaacctggatggagccttggatgaggtcgtgctcaagtttgaaatgggccatgtgagagcgaggaacctggcctatgacaccctcccggtcctgatccatggcaacgggccaaccaagctgcagttgaactacctgggcaactacatcccgcgcttctggaccttcgaaacaggctgcaccgtgtgtgacgaaggcttgcgcagcctcaagggcattgggcggctcctgcggctccactacccccagaaacacatgcgacttttcatccacaaccacgagcagcaccacaaggctcaggtggaagagttcctggcacagcatggcagcgagtaccagtctgtgaagctggtgggccctgaggtgcggatggcgaatgcagatgccaggaacatgggcgcagacctgtgccggcaggaccgcagctgcacctactacttcagcgtggatgctgacgtggccctgaccgagcccaacagcctgcggctgctgatccaacagaacaagaacgtcattgccccgctgatgacccggcatgggaggctgtggtcgaacttctggggggctctcagtgcagatggctactatgcccgttccgaggactacgtggacattgtgcaggggcggcgtgttggtgtctggaatgtgccctatatttcaaacatctacttgatcaagggcagtgccctgcggggtgagctgcagtcctcagatctcttccaccacagcaagctggaccccgacatggccttctgtgccaacatccggcagcaggatgtgttcatgttcctgaccaaccggcacacccttggccatctgctctccctagacagctaccgcaccacccacctgcacaacgacctctgggaggtgttcagcaaccccgaggactggaaggagaagtacatccaccagaactacaccaaagccctggcagggaagctggtggagacgccctgcccggatgtctattggttccccatcttcacggaggtggcctgtgatgagctggtggaggagatggagcactttggccagtggtctctgggcaacaacaaggacaaccgcatccagggtggctacgagaacgtgccgactattgacatccacatgaaccagatcggctttgagcgggagtggcacaaattcctgctggagtacattgcgcccatgacggagaagctctaccccggctactacaccagggcccagtttgacctggcctttgtcgtccgctacaagcctgatgagcagccctcactgatgccacaccatgatgcctccaccttcaccatcaacatcgccctgaaccgagtcggggtggattacgagggcgggggctgtcggttcctgcgctacaactgttccatccgagccccaaggaagggctggaccctcatgcaccctggacgactcacgcattaccatgaggggctccccaccaccaggggcacccgctacatcgcagtctccttcgtcgatccctaattggccaggcctgaccctcttggacctttcttctttgccgacaaccactgcccagcagcctctgggacctcggggtcccagggaacccagtccagcctcctggctgttgacttcccattgctcttggagccaccaatcaaagagattcaaagagattcctgcaggccagaggcggaacacacctttatggctggggctctccgtggtgttctggacccagcccctggagacaccattcacttttactgctttgtagtgactcgtgctctccaacctgtcttcctgaaaaaccaaggcccccttcccccacctcttccatggggtgagacttgagcagaacaggggcttccccaagttgcccagaaagactgtctgggtgagaagccatggccagagcttctcccaggcacaggtgttgcaccagggacttctgcttcaagttttggggtaaagacacctggatcagactccaagggctgccctgagtctgggacttctgcctccatggctggtcatgagagcaaaccgtagtcccctggagacagcgactccagagaacctcttgggagacagaagaggcatctgtgcacagctcgatcttctacttgcctgtggggaggggagtgacaggtccacacaccacactgggtcaccctgtcctggatgcctctgaagagagggacagaccgtcagaaactggagagtttctattaaaggtcatttaaacca

SEQ ID NO: 316 - DNA, 3043 bp, Homo sapiens
cggggcgggcccagtgcgtggcagcgggacctgcggccccgtcgcgaagtttccagccctgcgagcgccgccgggtcggccgatcgtcccccatacctcggccatgcggcccctgctgctactggccctgctgggctggctgctgctggccgaagcgaagggcgacgccaagccggaggacaaccttttagtcctcacggtggccactaaggagaccgagggattccgtcgcttcaagcgctcagctcagttcttcaactacaagatccagcccgtgttaaggggtgtttctctccaggcgcttggcctaggggaggactggaatgtggagaaggggacgtcggcaggtggagggcagaaggtccggctgctgaagaaagctctggagaagcacgcagacaaggaggatctggtcattctcttcgcagacagctatgacgtgctgtttgcatcggggccccgggagctcctgaagaagttccggcaggccaggagccaggtggtcttctctgctgaggagctcatctacccagaccgcaggctggagaccaagtatccggtggtgtccgatggcaagaggttcctgggctctggaggcttcatcggttatgcccccaacctcagcaaactggtggccgagtgggagggccaggacagcgacagcgatcagctgttttacaccaagatcttcttggacccggagaagagggagcagatcaatatcaccctggaccaccgctgccgtatcttccagaacctggatggagccttggatgaggtcgtgctcaagtttgaaatgggccatgtgagagcgaggaacctggcctatgacaccctcccggtcctgatccatggcaacgggccaaccaagctgcagttgaactacctgggcaactacatcccgcgcttctggaccttcgaaacaggctgcaccgtgtgtgacgaaggcttgcgcagcctcaagggcattggggatgaagctctgcccacggtcctggtcggcgtgttcatcgaacagcccacgccgtttgtgtccctgttcttccagcggctcctgcggctccactacccccagaaacacatgcgacttttcatccacaaccacgagcagcaccacaaggctcaggtggaagagttcctggcacagcatggcagcgagtaccagtctgtgaagctggtgggccctgaggtgcggatggcgaatgcagatgccaggaacatgggcgcagacctgtgccggcaggaccgcagctgcacctactacttcagcgtggatgctgacgtggccctgaccgagcccaacagcctgcggctgctgatccaacagaacaagaacgtcattgccccgctgatgacccggcatgggaggctgtggtcgaacttctggggggctctcagtgcagatggctactatgcccgttccgaggactacgtggacattgtgcaggggcggcgtgttggtgtctggaatgtgccctatatttcaaacatctacttgatcaagggcagtgccctgcggggtgagctgcagtcctcagatctcttccaccacagcaagctggaccccgacatggccttctgtgccaacatccggcagcaggatgtgttcatgttcctgaccaaccggcacacccttggccatctgctctccctagacagctaccgcaccacccacctgcacaacgacctctgggaggtgttcagcaaccccgaggactggaaggagaagtacatccaccagaactacaccaaagccctggcagggaagctggtggagacgccctgcccggatgtctattggttccccatcttcacggaggtggcctgtgatgagctggtggaggagatggagcactttggccagtggtctctgggcaacaacaaggacaaccgcatccagggtggctacgagaacgtgccgactattgacatccacatgaaccagatcggctttgagcgggagtggcacaaattcctgctggagtacattgcgcccatgacggagaagctctaccccggctactacaccagggcccagtttgacctggcctttgtcgtccgctacaagcctgatgagcagccctcactgatgccacaccatgatgcctccaccttcaccatcaacatcgccctgaaccgagtcggggtggattacgagggcgggggctgtcggttcctgcgctacaactgttccatccgagccccaaggaagggctggaccctcatgcaccctggacgactcacgcattaccatgaggggctccccaccaccaggggcacccgctacatcgcagtctccttcgtcgatccctaattggccaggcctgaccctcttggacctttcttctttgccgacaaccactgcccagcagcctctgggacctcggggtcccagggaacccagtccagcctcctggctgttgacttcccattgctcttggagccaccaatcaaagagattcaaagagattcctgcaggccagaggcggaacacacctttatggctggggctctccgtggtgttctggacccagcccctggagacaccattcacttttactgctttgtagtgactcgtgctctccaacctgtcttcctgaaaaaccaaggcccccttcccccacctcttccatggggtgagacttgagcagaacaggggcttccccaagttgcccagaaagactgtctgggtgagaagccatggccagagcttctcccaggcacaggtgttgcaccagggacttctgcttcaagttttggggtaaagacacctggatcagactccaagggctgccctgagtctgggacttctgcctccatggctggtcatgagagcaaaccgtagtcccctggagacagcgactccagagaacctcttgggagacagaagaggcatctgtgcacagctcgatcttctacttgcctgtggggaggggagtgacaggtccacacaccacactgggtcaccctgtcctggatgcctctgaagagagggacagaccgtcagaaactggagagtttctattaaaggtcatttaaacca

SEQ ID NO: 317 - DNA, 3272 bp, Homo sapiens
cggggcgggcccagtgcgtggcagcgggacctgcggccccgtcgcgaagtttccagccctgcgagcgccgccgggtcggccgatcgtcccccatacctcggccatgcggcccctgctgctactggccctgctgggctggctgctgctggccgaagcgaagggcgacgccaagccggaggacaaccttttagtcctcacggtggccactaaggagaccgagggattccgtcgcttcaagcgctcagctcagttcttcaactacaagatccaggcgcttggcctaggggaggactggaatgtggagaaggggacgtcggcaggtggagggcagaaggtccggctgctgaagaaagctctggagaagcacgcagacaaggaggatctggtcattctcttcgcagacagctatgacgtgctgtttgcatcggggccccgggagctcctgaagaagttccggcaggccaggagccaggtggtcttctctgctgaggagctcatctacccagaccgcaggctggagaccaagtatccggtggtgtccgatggcaagaggttcctgggctctggaggcttcatcggttatgcccccaacctcagcaaactggtggccgagtgggagggccaggacagcgacagcgatcagctgttttacaccaagatcttcttggacccggagaagagggtgagccggctgcattcttagattccttccagttcagagtccctggttttctgtgagtagagccactagactgtagaccccaggagcttggctgctggccttctctgggcacctagctgccctgatgtgacgtggcagagtcggtgtggggaatgagggctgaacttggggacagattccccacactgggtgagatgtagccccagcctcccccagggcctgtccctgctgcagtctggtaccttctttcctgcaggagcagatcaatatcaccctggaccaccgctgccgtatcttccagaacctggatggagccttggatgaggtcgtgctcaagtttgaaatgggccatgtgagagcgaggaacctggcctatgacaccctcccggtcctgatccatggcaacgggccaaccaagctgcagttgaactacctgggcaactacatcccgcgcttctggaccttcgaaacaggctgcaccgtgtgtgacgaaggcttgcgcagcctcaagggcattggggatgaagctctgcccacggtcctggtcggcgtgttcatcgaacagcccacgccgtttgtgtccctgttcttccagcggctcctgcggctccactacccccagaaacacatgcgacttttcatccacaaccacgagcagcaccacaaggctcaggtggaagagttcctggcacagcatggcagcgagtaccagtctgtgaagctggtgggccctgaggtgcggatggcgaatgcagatgccaggaacatgggcgcagacctgtgccggcaggaccgcagctgcacctactacttcagcgtggatgctgacgtggccctgaccgagcccaacagcctgcggctgctgatccaacagaacaagaacgtcattgccccgctgatgacccggcatgggaggctgtggtcgaacttctggggggctctcagtgcagatggctactatgcccgttccgaggactacgtggacattgtgcaggggcggcgtgttggtgtctggaatgtgccctatatttcaaacatctacttgatcaagggcagtgccctgcggggtgagctgcagtcctcagatctcttccaccacagcaagctggaccccgacatggccttctgtgccaacatccggcagcaggatgtgttcatgttcctgaccaaccggcacacccttggccatctgctctccctagacagctaccgcaccacccacctgcacaacgacctctgggaggtgttcagcaaccccgaggactggaaggagaagtacatccaccagaactacaccaaagccctggcagggaagctggtggagacgccctgcccggatgtctattggttccccatcttcacggaggtggcctgtgatgagctggtggaggagatggagcactttggccagtggtctctgggcaacaacaaggacaaccgcatccagggtggctacgagaacgtgccgactattgacatccacatgaaccagatcggctttgagcgggagtggcacaaattcctgctggagtacattgcgcccatgacggagaagctctaccccggctactacaccagggcccagtttgacctggcctttgtcgtccgctacaagcctgatgagcagccctcactgatgccacaccatgatgcctccaccttcaccatcaacatcgccctgaaccgagtcggggtggattacgagggcgggggctgtcggttcctgcgctacaactgttccatccgagccccaaggaagggctggaccctcatgcaccctggacgactcacgcattaccatgaggggctccccaccaccaggggcacccgctacatcgcagtctccttcgtcgatccctaattggccaggcctgaccctcttggacctttcttctttgccgacaaccactgcccagcagcctctgggacctcggggtcccagggaacccagtccagcctcctggctgttgacttcccattgctcttggagccaccaatcaaagagattcaaagagattcctgcaggccagaggcggaacacacctttatggctggggctctccgtggtgttctggacccagcccctggagacaccattcacttttactgctttgtagtgactcgtgctctccaacctgtcttcctgaaaaaccaaggcccccttcccccacctcttccatggggtgagacttgagcagaacaggggcttccccaagttgcccagaaagactgtctgggtgagaagccatggccagagcttctcccaggcacaggtgttgcaccagggacttctgcttcaagttttggggtaaagacacctggatcagactccaagggctgccctgagtctgggacttctgcctccatggctggtcatgagagcaaaccgtagtcccctggagacagcgactccagagaacctcttgggagacagaagaggcatctgtgcacagctcgatcttctacttgcctgtggggaggggagtgacaggtccacacaccacactgggtcaccctgtcctggatgcctctgaagagagggacagaccgtcagaaactggagagtttctattaaaggtcatttaaacca

SEQ ID NO: 318 - DNA, 3022 bp, Homo sapiens
cggggcgggcccagtgcgtggcagcgggacctgcggccccgtcgcgaagtttccagccctgcgagcgccgccgggtcggccgatcgtcccccatacctcggccatgcggcccctgctgctactggccctgctgggctggctgctgctggccgaagcgaagggcgacgccaagccggaggacaaccttttagtcctcacggtggccactaaggagaccgagggattccgtcgcttcaagcgctcagctcagttcttcaactacaagatccaggcgcttggcctaggggaggactggaatgtggagaaggggacgtcggcaggtggagggcagaaggtccggctgctgaagaaagctctggagaagcacgcagacaaggaggatctggtcattctcttcgcagacagctatgacgtgctgtttgcatcggggccccgggagctcctgaagaagttccggcaggccaggagccaggtggtcttctctgctgaggagctcatctacccagaccgcaggctggagaccaagtatccggtggtgtccgatggcaagaggttcctgggctctggaggcttcatcggttatgcccccaacctcagcaaactggtggccgagtgggagggccaggacagcgacagcgatcagctgttttacaccaagatcttcttggacccggagaagagggagcagatcaatatcaccctggaccaccgctgccgtatcttccagaacctggatggagccttggtgtctccctggggccagggccaccttcctggggcctgctatgaactcactgcctctgtcctcacatctgagctcagcgtgatgccttcttttcctgctgtggtgctgcagttgaactacctgggcaactacatcccgcgcttctggaccttcgaaacaggctgcaccgtgtgtgacgaaggcttgcgcagcctcaagggcattggggatgaagctctgcccacggtcctggtcggcgtgttcatcgaacagcccacgccgtttgtgtccctgttcttccagcggctcctgcggctccactacccccagaaacacatgcgacttttcatccacaaccacgagcagcaccacaaggctcaggtggaagagttcctggcacagcatggcagcgagtaccagtctgtgaagctggtgggccctgaggtgcggatggcgaatgcagatgccaggaacatgggcgcagacctgtgccggcaggaccgcagctgcacctactacttcagcgtggatgctgacgtggccctgaccgagcccaacagcctgcggctgctgatccaacagaacaagaacgtcattgccccgctgatgacccggcatgggaggctgtggtcgaacttctggggggctctcagtgcagatggctactatgcccgttccgaggactacgtggacattgtgcaggggcggcgtgttggtgtctggaatgtgccctatatttcaaacatctacttgatcaagggcagtgccctgcggggtgagctgcagtcctcagatctcttccaccacagcaagctggaccccgacatggccttctgtgccaacatccggcagcaggatgtgttcatgttcctgaccaaccggcacacccttggccatctgctctccctagacagctaccgcaccacccacctgcacaacgacctctgggaggtgttcagcaaccccgaggactggaaggagaagtacatccaccagaactacaccaaagccctggcagggaagctggtggagacgccctgcccggatgtctattggttccccatcttcacggaggtggcctgtgatgagctggtggaggagatggagcactttggccagtggtctctgggcaacaacaaggacaaccgcatccagggtggctacgagaacgtgccgactattgacatccacatgaaccagatcggctttgagcgggagtggcacaaattcctgctggagtacattgcgcccatgacggagaagctctaccccggctactacaccagggcccagtttgacctggcctttgtcgtccgctacaagcctgatgagcagccctcactgatgccacaccatgatgcctccaccttcaccatcaacatcgccctgaaccgagtcggggtggattacgagggcgggggctgtcggttcctgcgctacaactgttccatccgagccccaaggaagggctggaccctcatgcaccctggacgactcacgcattaccatgaggggctccccaccaccaggggcacccgctacatcgcagtctccttcgtcgatccctaattggccaggcctgaccctcttggacctttcttctttgccgacaaccactgcccagcagcctctgggacctcggggtcccagggaacccagtccagcctcctggctgttgacttcccattgctcttggagccaccaatcaaagagattcaaagagattcctgcaggccagaggcggaacacacctttatggctggggctctccgtggtgttctggacccagcccctggagacaccattcacttttactgctttgtagtgactcgtgctctccaacctgtcttcctgaaaaaccaaggcccccttcccccacctcttccatggggtgagacttgagcagaacaggggcttccccaagttgcccagaaagactgtctgggtgagaagccatggccagagcttctcccaggcacaggtgttgcaccagggacttctgcttcaagttttggggtaaagacacctggatcagactccaagggctgccctgagtctgggacttctgcctccatggctggtcatgagagcaaaccgtagtcccctggagacagcgactccagagaacctcttgggagacagaagaggcatctgtgcacagctcgatcttctacttgcctgtggggaggggagtgacaggtccacacaccacactgggtcaccctgtcctggatgcctctgaagagagggacagaccgtcagaaactggagagtttctattaaaggtcatttaaacca

SEQ ID NO: 319 - DNA, 2113 bp, Homo sapiens
cggggcgggcccagtgcgtggcagcgggacctgcggccccgtcgcgaagtttccagccctgcgagcgccgccgggtcggccgatcgtcccccatacctcggccatgcggcccctgctgctactggccctgctgggctggctgctgctggccgaagcgaagggcgacgccaagccggaggacaaccttttagtcctcacggtggccactaaggagaccgagggattccgtcgcttcaagcgctcagctcagttcttcaactacaagatccaggcgcttggcctaggggaggactggaatgtggagaaggggacgtcggcaggtggagggcagaaggtccggctgctgaagaaagctctggagaagcacgcagacaaggaggatctggtcattctcttcgcagacagctatgacgtgctgtttgcatcggggccccgggagctcctgaagaagttccggcaggccaggagccaggtggtcttctctgctgaggagctcatctacccagaccgcaggctggagaccaagtatccggtggtgtccgatggcaagaggttcctgggctctggaggcttcatcggttatgcccccaacctcagcaaactggtggccgagtgggagggccaggacagcgacagcgatcagctgttttacaccaagatcttcttggacccggagaagagggagcagatcaatatcaccctggaccaccgctgccgtatcttccagaacctggatggagccttggatgaggtcgtgctcaagtttgaaatgggccatgtgagagcgaggaacctggcctatgacaccctcccggtcctgatccatggcaacgggccaaccaagctgcagttgaactacctgggcaactacatcccgcgcttctggaccttcgaaacaggctgcaccgtgtgtgacgaaggcttgcgcagcctcaagggcattggggatgaagctctgcccacggtcctggtcggcgtgttcatcgaacagcccacgccgtttgtgtccctgttcttccagcggctcctgcggctccactacccccagaaacacatgcgacttttcatccacaaccacgagcagcaccacaaggctcaggtggaagagttcctggcacagcatggcagcgagtaccagtctgtgaagctggtgggccctgaggtgcggatggcgaatgcagatgccaggaacatgggcgcagacctgtgccggcaggaccgcagctgcacctactacttcagcgtggatgctgacgtggccctgaccgagcccaacagcctgcggctgctgatccaacagaacaagaacgtcattgccccgctgatgacccggcatgggaggctgtggtcgaacttctggggggctctcagtgcagatggctactatgcccgttccgaggactacgtggacattgtgcaggggcggcgtgttggtgtctggaatgtgccctatatttcaaacatctacttgatcaagggcagtgccctgcggggtgagctgcagtcctcagatctcttccaccacagcaagctggaccccgacatggccttctgtgccaacatccggcagcaggatgtgttcatgttcctgaccaaccggcacacccttggccatctgctctccctagacagctaccgcaccacccacctgcacaacgacctctgggaggtgttcagcaaccccgaggactggaaggagaagtacatccaccagaactacaccaaagccctggcagggaagctggtggagacgccctgcccggatgtctattggttccccatcttcacggaggtggcctgtgatgagctggtggaggagatggagcactttggccagtggtctctgggcaacaacaagggctgccctgagtctgggacttctgcctccatggctggtcatgagagcaaaccgtagtcccctggagacagcgactccagagaacctcttgggagacagaagaggcatctgtgcacagctcgatcttctacttgcctgtggggaggggagtgacaggtccacacaccacactgggtcaccctgtcctggatgcctctgaagagagggacagaccgtcagaaactggagagtttctattaaaggtcatttaaacca

SEQ ID NO: 320 - DNA, 2046 bp, Homo sapiens
cggggcgggcccagtgcgtggcagcgggacctgcggccccgtcgcgaagtttccagccctgcgagcgccgccgggtcggccgatcgtcccccatacctcggccatgcggcccctgctgctactggccctgctgggctggctgctgctggccgaagcgaagggcgacgccaagccggaggacaaccttttagtcctcacggtggccactaaggagaccgagggattccgtcgcttcaagcgctcagctcagttcttcaactacaagatccaggcgcttggcctaggggaggactggaatgtggagaaggggacgtcggcaggtggagggcagaaggtccggctgctgaagaaagctctggagaagcacgcagacaaggaggatctggtcattctcttcgcagacagctatgacgtgctgtttgcatcggggccccgggagctcctgaagaagttccggcaggccaggagccaggtggtcttctctgctgaggagctcatctacccagaccgcaggctggagaccaagtatccggtggtgtccgatggcaagaggttcctgggctctggaggcttcatcggttatgcccccaacctcagcaaactggtggccgagtgggagggccaggacagcgacagcgatcagctgttttacaccaagatcttcttggacccggagaagagggagcagatcaatatcaccctggaccaccgctgccgtatcttccagaacctggatggagccttggatgaggtcgtgctcaagtttgaaatgggccatgtgagagcgaggaacctggcctatgacaccctcccggtcctgatccatggcaacgggccaaccaagctgcagttgaactacctgggcaactacatcccgcgcttctggaccttcgaaacaggctgcaccgtgtgtgacgaaggcttgcgcagcctcaagggcattggggatgaagctctgcccacggtcctggtcggcgtgttcatcgaacagcccacgccgtttgtgtccctgttcttccagcggctcctgcggctccactacccccagaaacacatgcgacttttcatccacaaccacgagcagcaccacaaggctcaggtggaagagttcctggcacagcatggcagcgagtaccagtctgtgaagctggtgggccctgaggtgcggatggcgaatgcagatgccaggaacatgggcgcagacctgtgccggcaggaccgcagctgcacctactacttcagcgtggatgctgacgtggccctgaccgagcccaacagcctgcggctgctgatccaacagaacaagaacgtcattgccccgctgatgacccggcatgggaggctgtggtcgaacttctggggggctctcagtgcagatggctactatgcccgttccgaggactacgtggacattgtgcaggggcggcgtgttggtgtctggaatgtgccctatatttcaaacatctacttgatcaagggcagtgccctgcggggtgagctgcagtcctcagatctcttccaccacagcaagctggaccccgacatggccttctgtgccaacatccggcagcaggatgtgttcatgttcctgaccaaccggcacacccttggccatctgctctccctagacagctaccgcaccacccacctgcacaacgacctctgggaggtgttcagcaaccccgaggactggaaggagaagtacatccaccagaactacaccaaagccctggcagggaagctggtggagacgccctgcccggatgtctattggttccccatcttcacggaggtggcctgtgatgagctggtggaggagatggagcactttggccagtggtctctgggcaacaacaagacagcgactccagagaacctcttgggagacagaagaggcatctgtgcacagctcgatcttctacttgcctgtggggaggggagtgacaggtccacacaccacactgggtcaccctgtcctggatgcctctgaagagagggacagaccgtcagaaactggagagtttctattaaaggtcatttaaacca

SEQ ID NO: 321 - DNA, 1862 bp, Homo sapiens
cggggcgggcccagtgcgtggcagcgggacctgcggccccgtcgcgaagtttccagccctgcgagcgccgccgggtcggccgatcgtcccccatacctcggccatgcggcccctgctgctactggccctgctgggctggctgctgctggccgaagcgaagggcgacgccaagccggaggacaaccttttagtcctcacggtggccactaaggagaccgagggattccgtcgcttcaagcgctcagctcagttcttcaactacaagatccaggcgcttggcctaggggaggactggaatgtggagaaggggacgtcggcaggtggagggcagaaggtccggctgctgaagaaagctctggagaagcacgcagacaaggaggatctggtcattctcttcgcagacagctatgacgtgctgtttgcatcggggccccgggagctcctgaagaagttccggcaggccaggagccaggtggtcttctctgctgaggagctcatctacccagaccgcaggctggagaccaagtatccggtggtgtccgatggcaagaggttcctgggctctggaggcttcatcggttatgcccccaacctcagcaaactggtggccgagtgggagggccaggacagcgacagcgatcagctgttttacaccaagatcttcttggacccggagaagagggagcagatcaatatcaccctggaccaccgctgccgtatcttccagaacctggatggagccttggatgaggtcgtgctcaagtttgaaatgggccatgtgagagcgaggaacctggcctatgacaccctcccggtcctgatccatggcaacgggccaaccaagctgcagttgaactacctgggcaactacatcccgcgcttctggaccttcgaaacaggctgcaccgtgtgtgacgaaggcttgcgcagcctcaagggcattggggatgaagctctgcccacggtcctggtcggcgtgttcatcgaacagcccacgccgtttgtgtccctgttcttccagcggctcctgcggctccactacccccagaaacacatgcgacttttcatccacaaccacgagcagcaccacaaggctcaggtggaagagttcctggcacagcatggcagcgagtaccagtctgtgaagctggtgggccctgaggtgcggatggcgaatgcagatgccaggaacatgggcgcagacctgtgccggcaggaccgcagctgcacctactacttcagcgtggatgctgacgtggccctgaccgagcccaacagcctgcggctgctgatccaacagaacaagaacgtcattgccccgctgatgacccggcatgggaggctgtggtcgaacttctggggggctctcagtgcagatggctactatgcccgttccgaggactacgtggacattgtgcaggggcggcgtgttggtgtctggaatgtgccctatatttcaaacatctacttgatcaagggcagtgccctgcggggtgagctgcagtcctcagatctcttccaccacagcaagctggaccccgacatggccttctgtgccaacatccggcagcaggatgtgttcatgttcctgaccaaccggcacacccttggccatctgctctccctagacagctaccgcaccacccacctgcacaacgacctctgggaggtgttcagcaaccccgaggactggaaggagaagtacatccaccagaactacaccaaagccctggcagggaagctggtggagacggtaagggccatggacaccctcttggaccagccttgcctgctgcagggggcagggcacagaagggaaactgcttgccctggggagtgggggacagcaggatgggagttgg

SEQ ID NO: 322 - DNA, 990 bp, Homo sapiens
cggggcgggcccagtgcgtggcagcgggacctgcggccccgtcgcgaagtttccagccctgcgagcgccgccgggtcggccgatcgtcccccatacctcggccatgcggcccctgctgctactggccctgctgggctggctgctgctggccgaagcgaagggcgacgccaagccggaggacaaccttttagtcctcacggtggccactaaggagaccgagggattccgtcgcttcaagcgctcagctcagttcttcaactacaagatccagctgaccctcttggacctttcttctttgccgacaaccactgcccagcagcctctgggacctcggggtcccagggaacccagtccagcctcctggctgttgacttcccattgctcttggagccaccaatcaaagagattcaaagagattcctgcaggccagaggcggaacacacctttatggctggggctctccgtggtgttctggacccagcccctggagacaccattcacttttactgctttgtagtgactcgtgctctccaacctgtcttcctgaaaaaccaaggcccccttcccccacctcttccatggggtgagacttgagcagaacaggggcttccccaagttgcccagaaagactgtctgggtgagaagccatggccagagcttctcccaggcacaggtgttgcaccagggacttctgcttcaagttttggggtaaagacacctggatcagactccaagggctgccctgagtctgggacttctgcctccatggctggtcatgagagcaaaccgtagtcccctggagacagcgactccagagaacctcttgggagacagaagaggcatctgtgcacagctcgatcttctacttgcctgtggggaggggagtgacaggtccacacaccacactgggtcaccctgtcctggatgcctctgaagagagggacagaccgtcagaaactggagagtttctattaaaggtcatttaaacca

SEQ ID NO: 323 - DNA, 141 bp, Artificial
  Synthetic oligonucleotide
ccccctgttgccaagagggcctcagagctggtggctctggttctcttcacctggggagagacttcaccgtcctggcaggagctcgggggagcccttccccaagtgtgagcagcatccctcgtttctggatcccaggttcag

SEQ ID NO: 324 - DNA, 164 bp, Artificial
  Synthetic oligonucleotide
ctatgacgtgctgtttgcatcggggccccgggagctcctgaagaagttccggcaggccaggagccaggtggtcttctctgctgaggagctcatctacccagaccgcaggctggagaccaagtatccggtggtgtccgatggcaagaggttcctgggctctggag

SEQ ID NO: 325 - DNA, 256 bp, Artificial
  Synthetic oligonucleotide
gtgagccggctgcattcttagattccttccagttcagagtccctggttttctgtgagtagagccactagactgtagaccccaggagcttggctgctggccttctctgggcacctagctgccctgatgtgacgtggcagagtcggtgtggggaatgagggctgaacttggggacagattccccacactgggtgagatgtagccccagcctcccccagggcctgtccctgctgcagtctggtaccttctttcctgcag

SEQ ID NO: 326 - DNA, 126 bp, Artificial
  Synthetic oligonucleotide
gaacgtcattgccccgctgatgacccggcatgggaggctgtggtcgaacttctggggggctctcagtgcagatggctactatgcccgttccgaggactacgtggacattgtgcaggggcggcgtgt

SEQ ID NO: 327 - DNA, 129 bp, Artificial
  Synthetic oligonucleotide
gacaaccgcatccagggtggctacgagaacgtgccgactattgacatccacatgaaccagatcggctttgagcgggagtggcacaaattcctgctggagtacattgcgcccatgacggagaagctctac

SEQ ID NO: 328 - DNA, 126 bp, Artificial
  Synthetic oligonucleotide
gcccagtttgacctggcctttgtcgtccgctacaagcctgatgagcagccctcactgatgccacaccatgatgcctccaccttcaccatcaacatcgccctgaaccgagtcggggtggattacgag

SEQ ID NO: 329 - DNA, 166 bp, Artificial
  Synthetic oligonucleotide
ggcgggggctgtcggttcctgcgctacaactgttccatccgagccccaaggaagggctggaccctcatgcaccctggacgactcacgcattaccatgaggggctccccaccaccaggggcacccgctacatcgcagtctccttcgtcgatccctaattggccaggc

SEQ ID NO: 330 - DNA, 272 bp, Artificial
  Synthetic oligonucleotide
ctgaccctcttggacctttcttctttgccgacaaccactgcccagcagcctctgggacctcggggtcccagggaacccagtccagcctcctggctgttgacttcccattgctcttggagccaccaatcaaagagattcaaagagattcctgcaggccagaggcggaacacacctttatggctggggctctccgtggtgttctggacccagcccctggagacaccattcacttttactgctttgtagtgactcgtgctctccaacctgtcttc

SEQ ID NO: 331 - DNA, 140 bp, Artificial
  Synthetic oligonucleotide
cagaacaggggcttccccaagttgcccagaaagactgtctgggtgagaagccatggccagagcttctcccaggcacaggtgttgcaccagggacttctgcttcaagttttggggtaaagacacctggatcagactccaag

SEQ ID NO: 332 - DNA, 133 bp, Artificial
  Synthetic oligonucleotide
agaacctcttgggagacagaagaggcatctgtgcacagctcgatcttctacttgcctgtggggaggggagtgacaggtccacacaccacactgggtcaccctgtcctggatgcctctgaagagagggacagac

SEQ ID NO: 333 - DNA, 565 bp, Artificial
  Synthetic oligonucleotide
cgtcagaaactggagagtttctattaaaggtcatttaaaccactgaagggaagatgctcagggcgagtgggtgtgtgtgtgtcttggtgtgagtgtctgcagggagagaggttttaagagccctctttttttttttttttctttttttgagacagagtctcactctgtcttccaggctggagtgcaatgacgctatccccgctttctgcaacccccgcctcctgggttcaagtaattctcctgcctcagccttccgagcagctggggctacaggcacccatcaccacgcctggctaatttttgtttttttattaaagaaagggtttcaccaggttggtctggctggtcttgaactcctgacctcagatgatccacccacctcggcctcccaaagtgctgggattacaggcatgagccaccgtgcccggccaagagccctctttttagagcctttaagaaaggtcatgctagcctctcgacccctgagtagctgggattataggtatccatgcctgacacatttttgtattttttgtagaaacggggtttcatttcaccgtgttgg

SEQ ID NO: 334 - DNA, 76 bp, Artificial
  Synthetic oligonucleotide
cggggcgggcccagtgcgtggcagcgggacctgcggccccgtcgcgaagtttccagccctgcgagcgccgccgggt

SEQ ID NO: 335 - DNA, 103 bp, Artificial
  Synthetic oligonucleotide
cggccgatcgtcccccatacctcggccatgcggcccctgctgctactggccctgctgggctggctgctgctggccgaagcgaagggcgacgccaagccggagg

SEQ ID NO: 336 - DNA, 92 bp, Artificial
  Synthetic oligonucleotide
acaaccttttagtcctcacggtggccactaaggagaccgagggattccgtcgcttcaagcgctcagctcagttcttcaactacaagatccag

SEQ ID NO: 337 - DNA, 27 bp, Artificial
  Synthetic oligonucleotide
cccgtgttaaggggtgtttctctccag

SEQ ID NO: 338 - DNA, 84 bp, Artificial
  Synthetic oligonucleotide
gcgcttggcctaggggaggactggaatgtggagaaggggacgtcggcaggtggagggcagaaggtccggctgctgaagaaagct

SEQ ID NO: 339 - DNA, 50 bp, Artificial
  Synthetic oligonucleotide
ctggagaagcacgcagacaaggaggatctggtcattctcttcgcagacag

SEQ ID NO: 340 - DNA, 113 bp, Artificial
  Synthetic oligonucleotide
gcttcatcggttatgcccccaacctcagcaaactggtggccgagtgggagggccaggacagcgacagcgatcagctgttttacaccaagatcttcttggacccggagaagagg

SEQ ID NO: 341 - DNA, 64 bp, Artificial
  Synthetic oligonucleotide
gagcagatcaatatcaccctggaccaccgctgccgtatcttccagaacctggatggagccttgg

SEQ ID NO: 342 - DNA, 98 bp, Artificial
  Synthetic oligonucleotide
atgaggtcgtgctcaagtttgaaatgggccatgtgagagcgaggaacctggcctatgacaccctcccggtcctgatccatggcaacgggccaaccaag

SEQ ID NO: 343 - DNA, 104 bp, Artificial
  Synthetic oligonucleotide
tgtctccctggggccagggccaccttcctggggcctgctatgaactcactgcctctgtcctcacatctgagctcagcgtgatgccttcttttcctgctgtggtg

SEQ ID NO: 344 - DNA, 102 bp, Artificial
  Synthetic oligonucleotide
ctgcagttgaactacctgggcaactacatcccgcgcttctggaccttcgaaacaggctgcaccgtgtgtgacgaaggcttgcgcagcctcaagggcattggg

SEQ ID NO: 345 - DNA, 75 bp, Artificial
  Synthetic oligonucleotide
gatgaagctctgcccacggtcctggtcggcgtgttcatcgaacagcccacgccgtttgtgtccctgttcttccag

SEQ ID NO: 346 - DNA, 57 bp, Artificial
  Synthetic oligonucleotide
cggctcctgcggctccactacccccagaaacacatgcgacttttcatccacaaccac

SEQ ID NO: 347 - DNA, 84 bp, Artificial
  Synthetic oligonucleotide
gagcagcaccacaaggctcaggtggaagagttcctggcacagcatggcagcgagtaccagtctgtgaagctggtgggccctgag

SEQ ID NO: 348 - DNA, 38 bp, Artificial
  Synthetic oligonucleotide
gtgcggatggcgaatgcagatgccaggaacatgggcgc

SEQ ID NO: 349 - DNA, 105 bp, Artificial
  Synthetic oligonucleotide
agacctgtgccggcaggaccgcagctgcacctactacttcagcgtggatgctgacgtggccctgaccgagcccaacagcctgcggctgctgatccaacagaacaa

SEQ ID NO: 350 - DNA, 37 bp, Artificial
  Synthetic oligonucleotide
tggtgtctggaatgtgccctatatttcaaacatctac

SEQ ID NO: 351 - DNA, 105 bp, Artificial
  Synthetic oligonucleotide
ttgatcaagggcagtgccctgcggggtgagctgcagtcctcagatctcttccaccacagcaagctggaccccgacatggccttctgtgccaacatccggcagcag

SEQ ID NO: 352 - DNA, 53 bp, Artificial
  Synthetic oligonucleotide
gtcagccaggagcgggcagcacaggacgccctctggatggggcaggcgggaag

SEQ ID NO: 353 - DNA, 20 bp, Artificial
  Synthetic oligonucleotide
gatgtgttcatgttcctgac

SEQ ID NO: 354 - DNA, 39 bp, Artificial
  Synthetic oligonucleotide
caaccggcacacccttggccatctgctctccctagacag

SEQ ID NO: 355 - DNA, 55 bp, Artificial
  Synthetic oligonucleotide
ctaccgcaccacccacctgcacaacgacctctgggaggtgttcagcaaccccgag

SEQ ID NO: 356 - DNA, 66 bp, Artificial
  Synthetic oligonucleotide
gactggaaggagaagtacatccaccagaactacaccaaagccctggcagggaagctggtggagacg

SEQ ID NO: 357 - DNA, 109 bp, Artificial
  Synthetic oligonucleotide
gtaagggccatggacaccctcttggaccagccttgcctgctgcagggggcagggcacagaagggaaactgcttgccctggggagtgggggacagcaggatgggagttgg

SEQ ID NO: 358 - DNA, 29 bp, Artificial
  Synthetic oligonucleotide
ccctgcccggatgtctattggttccccat

SEQ ID NO: 359 - DNA, 76 bp, Artificial
  Synthetic oligonucleotide
cttcacggaggtggcctgtgatgagctggtggaggagatggagcactttggccagtggtctctgggcaacaacaag

SEQ ID NO: 360 - DNA, 18 bp, Artificial
  Synthetic oligonucleotide
cccggctactacaccagg

SEQ ID NO: 361 - DNA, 22 bp, Artificial
  Synthetic oligonucleotide
ctgaaaaaccaaggcccccttc

SEQ ID NO: 362 - DNA, 30 bp, Artificial
  Synthetic oligonucleotide
ccccacctcttccatggggtgagacttgag

SEQ ID NO: 363 - DNA, 7 bp, Artificial
  Synthetic oligonucleotide
ggctgcc

SEQ ID NO: 364 - DNA, 33 bp, Artificial
  Synthetic oligonucleotide
ctgagtctgggacttctgcctccatggctggtc

SEQ ID NO: 365 - DNA, 27 bp, Artificial
  Synthetic oligonucleotide
atgagagcaaaccgtagtcccctggag

SEQ ID NO: 366 - DNA, 13 bp, Artificial
  Synthetic oligonucleotide
acagcgactccag

SEQ ID NO: 367 - protein, 727 aa, Homo sapiens [sequence omitted]

SEQ ID NO: 368 - protein, 727 aa, Homo sapiens
MRPLLLLALLGWLLLAEAKGDAKPEDNLLVLTVATKETEGFRRFKRSAQFFNYKIQALGLGEDWNVEKGTSAGGGQKVRLLKKALEKHADKEDLVILFADSYDVLFASGPRELLKKFRQARSQVVFSAEELIYPDRRLETKYPVVSDGKRFLGSGGFIGYAPNLSKLVAEWEGQDSDSDQLFYTKIFLDPEKREQINITLDHRCRIFQNLDGALDEVVLKFEMGHVRARNLAYDTLPVLIHGNGPTKLQLNYLGNYIPRFWTFETGCTVCDEGLRSLKGIGDEALPTVLVGVFIEQPTPFVSLFFQRLLRLHYPQKHMRLFIHNHEQHHKAQVEEFLAQHGSEYQSVKLVGPEVRMANADARNMGADLCRQDRSCTYYFSVDADVALTEPNSLRLLIQQNKNVIAPLMTRHGRLWSNFWGALSADGYYARSEDYVDIVQGRRVGVWNVPYISNIYLIKGSALRGELQSSDLFHHSKLDPDMAFCANIRQQDVFMFLTNRHTLGHLLSLDSYRTTHLHNDLWEVFSNPEDWKEKYIHQNYTKALAGKLVETPCPDVYWFPIFTEVACDELVEEMEHFGQWSLGNNKDNRIQGGYENVPTIDIHMNQIGFEREWHKFLLEYIAPMTEKLYPGYYTRAQFDLAFVVRYKPDEQPSLMPHHDASTFTINIALNRVGVDYEGGGCRFLRYNCSIRAPRKGWTLMHPGRLTHYHEGLPTTRGTRYIAVSFVDP

SEQ ID NO: 369 - protein, 513 aa, Homo sapiens
MRPLLLLALLGWLLLAEAKGDAKPEDNLLVLTVATKETEGFRRFKRSAQFFNYKIQALGLGEDWNVEKGTSAGGGQKVRLLKKALEKHADKEDLVILFADSYDVLFASGPRELLKKFRQARSQVVFSAEELIYPDRRLETKYPVVSDGKRFLGSGGFIGYAPNLSKLVAEWEGQDSDSDQLFYTKIFLDPEKREQINITLDHRCRIFQNLDGALDEVVLKFEMGHVRARNLAYDTLPVLIHGNGPTKLQLNYLGNYIPRFWTFETGCTVCDEGLRSLKGIGDEALPTVLVGVFIEQPTPFVSLFFQRLLRLHYPQKHMRLFIHNHEQHHKAQVEEFLAQHGSEYQSVKLVGPEVRMANADARNMGADLCRQDRSCTYYFSVDADVALTEPNSLRLLIQQNKNVIAPLMTRHGRLWSNFWGALSADGYYARSEDYVDIVQGRRVGVWNVPYISNIYLIKGSALRGELQSSDLFHHSKLDPDMAFCANIRQQVSQERAAQDALWMGQAGRMCSCS

SEQ ID NO: 370 - protein, 774 aa, Homo sapiens
MRPLLLLALLGWLLLAEAKGDAKPEAPCCQEGLRAGGSGSLHLGRDFTVLAGARGSPSPSVSSIPRFWIPGSDNLLVLTVATKETEGFRRFKRSAQFFNYKIQALGLGEDWNVEKGTSAGGGQKVRLLKKALEKHADKEDLVILFADSYDVLFASGPRELLKKFRQARSQVVFSAEELIYPDRRLETKYPVVSDGKRFLGSGGFIGYAPNLSKLVAEWEGQDSDSDQLFYTKIFLDPEKREQINITLDHRCRIFQNLDGALDEVVLKFEMGHVRARNLAYDTLPVLIHGNGPTKLQLNYLGNYIPRFWTFETGCTVCDEGLRSLKGIGDEALPTVLVGVFIEQPTPFVSLFFQRLLRLHYPQKHMRLFIHNHEQHHKAQVEEFLAQHGSEYQSVKLVGPEVRMANADARNMGADLCRQDRSCTYYFSVDADVALTEPNSLRLLIQQNKNVIAPLMTRHGRLWSNFWGALSADGYYARSEDYVDIVQGRRVGVWNVPYISNIYLIKGSALRGELQSSDLFHHSKLDPDMAFCANIRQQDVFMFLTNRHTLGHLLSLDSYRTTHLHNDLWEVFSNPEDWKEKYIHQNYTKALAGKLVETPCPDVYWFPIFTEVACDELVEEMEHFGQWSLGNNKDNRIQGGYENVPTIDIHMNQIGFEREWHKFLLEYIAPMTEKLYPGYYTRAQFDLAFVVRYKPDEQPSLMPHHDASTFTINIALNRVGVDYEGGGCRFLRYNCSIRAPRKGWTLMHPGRLTHYHEGLPTTRGTRYIAVSFVDP

SEQ ID NO: 371 - protein, 702 aa, Homo sapiens
MRPLLLLALLGWLLLAEAKGDAKPEDNLLVLTVATKETEGFRRFKRSAQFFNYKIQALGLGEDWNVEKGTSAGGGQKVRLLKKALEKHADKEDLVILFADSYDVLFASGPRELLKKFRQARSQVVFSAEELIYPDRRLETKYPVVSDGKRFLGSGGFIGYAPNLSKLVAEWEGQDSDSDQLFYTKIFLDPEKREQINITLDHRCRIFQNLDGALDEVVLKFEMGHVRARNLAYDTLPVLIHGNGPTKLQLNYLGNYIPRFWTFETGCTVCDEGLRSLKGIGRLLRLHYPQKHMRLFIHNHEQHHKAQVEEFLAQHGSEYQSVKLVGPEVRMANADARNMGADLCRQDRSCTYYFSVDADVALTEPNSLRLLIQQNKNVIAPLMTRHGRLWSNFWGALSADGYYARSEDYVDIVQGRRVGVWNVPYISNIYLIKGSALRGELQSSDLFHHSKLDPDMAFCANIRQQDVFMFLTNRHTLGHLLSLDSYRTTHLHNDLWEVFSNPEDWKEKYIHQNYTKALAGKLVETPCPDVYWFPIFTEVACDELVEEMEHFGQWSLGNNKDNRIQGGYENVPTIDIHMNQIGFEREWHKFLLEYIAPMTEKLYPGYYTRAQFDLAFVVRYKPDEQPSLMPHHDASTFTINIALNRVGVDYEGGGCRFLRYNCSIRAPRKGWTLMHPGRLTHYHEGLPTTRGTRYIAVSFVDP

SEQ ID NO: 372 - protein, 736 aa, Homo sapiens
MRPLLLLALLGWLLLAEAKGDAKPEDNLLVLTVATKETEGFRRFKRSAQFFNYKIQPVLRGVSLQALGLGEDWNVEKGTSAGGGQKVRLLKKALEKHADKEDLVILFADSYDVLFASGPRELLKKFRQARSQVVFSAEELIYPDRRLETKYPVVSDGKRFLGSGGFIGYAPNLSKLVAEWEGQDSDSDQLFYTKIFLDPEKREQINITLDHRCRIFQNLDGALDEVVLKFEMGHVRARNLAYDTLPVLIHGNGPTKLQLNYLGNYIPRFWTFETGCTVCDEGLRSLKGIGDEALPTVLVGVFIEQPTPFVSLFFQRLLRLHYPQKHMRLFIHNHEQHHKAQVEEFLAQHGSEYQSVKLVGPEVRMANADARNMGADLCRQDRSCTYYFSVDADVALTEPNSLRLLIQQNKNVIAPLMTRHGRLWSNFWGALSADGYYARSEDYVDIVQGRRVGVWNVPYISNIYLIKGSALRGELQSSDLFHHSKLDPDMAFCANIRQQDVFMFLTNRHTLGHLLSLDSYRTTHLHNDLWEVFSNPEDWKEKYIHQNYTKALAGKLVETPCPDVYWFPIFTEVACDELVEEMEHFGQWSLGNNKDNRIQGGYENVPTIDIHMNQIGFEREWHKFLLEYIAPMTEKLYPGYYTRAQFDLAFVVRYKPDEQPSLMPHHDASTFTINIALNRVGVDYEGGGCRFLRYNCSIRAPRKGWTLMHPGRLTHYHEGLPTTRGTRYIAVSFVDP

SEQ ID NO: 373 - protein, 729 aa, Homo sapiens
MRPLLLLALLGWLLLAEAKGDAKPEDNLLVLTVATKETEGFRRFKRSAQFFNYKIQALGLGEDWNVEKGTSAGGGQKVRLLKKALEKHADKEDLVILFADSYDVLFASGPRELLKKFRQARSQVVFSAEELIYPDRRLETKYPVVSDGKRFLGSGGFIGYAPNLSKLVAEWEGQDSDSDQLFYTKIFLDPEKREQINITLDHRCRIFQNLDGALVSPWGQGHLPGACYELTASVLTSELSVMPSFPAVVLQLNYLGNYIPRFWTFETGCTVCDEGLRSLKGIGDEALPTVLVGVFIEQPTPFVSLFFQRLLRLHYPQKHMRLFIHNHEQHHKAQVEEFLAQHGSEYQSVKLVGPEVRMANADARNMGADLCRQDRSCTYYFSVDADVALTEPNSLRLLIQQNKNVIAPLMTRHGRLWSNFWGALSADGYYARSEDYVDIVQGRRVGVWNVPYISNIYLIKGSALRGELQSSDLFHHSKLDPDMAFCANIRQQDVFMFLTNRHTLGHLLSLDSYRTTHLHNDLWEVFSNPEDWKEKYIHQNYTKALAGKLVETPCPDVYWFPIFTEVACDELVEEMEHFGQWSLGNNKDNRIQGGYENVPTIDIHMNQIGFEREWHKFLLEYIAPMTEKLYPGYYTRAQFDLAFVVRYKPDEQPSLMPHHDASTFTINIALNRVGVDYEGGGCRFLRYNCSIRAPRKGWTLMHPGRLTHYHEGLPTTRGTRYIAVSFVDP

SEQ ID NO: 374 - protein, 603 aa, Homo sapiens
MRPLLLLALLGWLLLAEAKGDAKPEDNLLVLTVATKETEGFRRFKRSAQFFNYKIQALGLGEDWNVEKGTSAGGGQKVRLLKKALEKHADKEDLVILFADSYDVLFASGPRELLKKFRQARSQVVFSAEELIYPDRRLETKYPVVSDGKRFLGSGGFIGYAPNLSKLVAEWEGQDSDSDQLFYTKIFLDPEKREQINITLDHRCRIFQNLDGALDEVVLKFEMGHVRARNLAYDTLPVLIHGNGPTKLQLNYLGNYIPRFWTFETGCTVCDEGLRSLKGIGDEALPTVLVGVFIEQPTPFVSLFFQRLLRLHYPQKHMRLFIHNHEQHHKAQVEEFLAQHGSEYQSVKLVGPEVRMANADARNMGADLCRQDRSCTYYFSVDADVALTEPNSLRLLIQQNKNVIAPLMTRHGRLWSNFWGALSADGYYARSEDYVDIVQGRRVGVWNVPYISNIYLIKGSALRGELQSSDLFHHSKLDPDMAFCANIRQQDVFMFLTNRHTLGHLLSLDSYRTTHLHNDLWEVFSNPEDWKEKYIHQNYTKALAGKLVETPCPDVYWFPIFTEVACDELVEEMEHFGQWSLGNNKGCPESGTSASMAGHESKP

SEQ ID NO: 375 - protein, 628 aa, Homo sapiens
MRPLLLLALLGWLLLAEAKGDAKPEDNLLVLTVATKETEGFRRFKRSAQFFNYKIQALGLGEDWNVEKGTSAGGGQKVRLLKKALEKHADKEDLVILFADSYDVLFASGPRELLKKFRQARSQVVFSAEELIYPDRRLETKYPVVSDGKRFLGSGGFIGYAPNLSKLVAEWEGQDSDSDQLFYTKIFLDPEKREQINITLDHRCRIFQNLDGALDEVVLKFEMGHVRARNLAYDTLPVLIHGNGPTKLQLNYLGNYIPRFWTFETGCTVCDEGLRSLKGIGDEALPTVLVGVFIEQPTPFVSLFFQRLLRLHYPQKHMRLFIHNHEQHHKAQVEEFLAQHGSEYQSVKLVGPEVRMANADARNMGADLCRQDRSCTYYFSVDADVALTEPNSLRLLIQQNKNVIAPLMTRHGRLWSNFWGALSADGYYARSEDYVDIVQGRRVGVWNVPYISNIYLIKGSALRGELQSSDLFHHSKLDPDMAFCANIRQQDVFMFLTNRHTLGHLLSLDSYRTTHLHNDLWEVFSNPEDWKEKYIHQNYTKALAGKLVETPCPDVYWFPIFTEVACDELVEEMEHFGQWSLGNNKTATPENLLGDRRGICAQLDLLLACGEGSDRSTHHTGSPCPGCL

SEQ ID NO: 376 - protein, 586 aa, Homo sapiens
MRPLLLLALLGWLLLAEAKGDAKPEDNLLVLTVATKETEGFRRFKRSAQFFNYKIQALGLGEDWNVEKGTSAGGGQKVRLLKKALEKHADKEDLVILFADSYDVLFASGPRELLKKFRQARSQVVFSAEELIYPDRRLETKYPVVSDGKRFLGSGGFIGYAPNLSKLVAEWEGQDSDSDQLFYTKIFLDPEKREQINITLDHRCRIFQNLDGALDEVVLKFEMGHVRARNLAYDTLPVLIHGNGPTKLQLNYLGNYIPRFWTFETGCTVCDEGLRSLKGIGDEALPTVLVGVFIEQPTPFVSLFFQRLLRLHYPQKHMRLFIHNHEQHHKAQVEEFLAQHGSEYQSVKLVGPEVRMANADARNMGADLCRQDRSCTYYFSVDADVALTEPNSLRLLIQQNKNVIAPLMTRHGRLWSNFWGALSADGYYARSEDYVDIVQGRRVGVWNVPYISNIYLIKGSALRGELQSSDLFHHSKLDPDMAFCANIRQQDVFMFLTNRHTLGHLLSLDSYRTTHLHNDLWEVFSNPEDWKEKYIHQNYTKALAGKLVETVRAMDTLLDQPCLLQGAGHRRETACPGEWGTAGWEL

SEQ ID NO: 377 - protein, 137 aa, Homo sapiens
MRPLLLLALLGWLLLAEAKGDAKPEDNLLVLTVATKETEGFRRFKRSAQFFNYKIQLTLLDLSSLPTTTAQQPLGPRGPREPSPASWLLTSHCSWSHQSKRFKEIPAGQRRNTPLWLGLSVVFWTQPLETPFTFTAL

SEQ ID NO: 378 - protein, 199 aa, Homo sapiens
MRPLLLLALLGWLLLAEAKGDAKPEDNLLVLTVATKETEGFRRFKRSAQFFNYKIQALGLGEDWNVEKGTSAGGGQKVRLLKKALEKHADKEDLVILFADSYDVLFASGPRELLKKFRQARSQVVFSAEELIYPDRRLETKYPVVSDGKRFLGSGGFIGYAPNLSKLVAEWEGQDSDSDQLFYTKIFLDPEKRVSRLHS

SEQ ID NO: 379 - DNA, 1667 bp, Homo sapiens
accttccccctttctttgatcgcctctcccttctgctggaccttccttcgtctctccatctctccctcctttccccgcgttctctttccacctttctcttcttcccaccttagacctcccttcctgccctcctttcctgcccaccgctgcttcctggcccttctccgaccccgctctagcagcagacctcctggggtctgtgggttgatctgtggcccctgtgcctccgtgtccttttcgtctcccttcctcccgactccgctcccggaccagcggcctgaccctggggaaaggatggttcccgaggtgagggtcctctcctccttgctgggactcgcgctgctctggttccccctggactcccacgctcgagcccgcccagacatgttctgccttttccatgggaagagatactcccccggcgagagctggcacccctacttggagccacaaggcctgatgtactgcctgcgctgtacctgctcagagggcgcccatgtgagttgttaccgcctccactgtccgcctgtccactgcccccagcctgtgacggagccacagcaatgctgtcccaagtgtgtggaacctcacactccctctggactccgggccccaccaaagtcctgccagcacaacgggaccatgtaccaacacggagagatcttcagtgcccatgagctgttcccctcccgcctgcccaaccagtgtgtcctctgcagctgcacagagggccagatctactgcgggctcacaacctgccccgaaccaggctgcccagcacccctcccgctgccagactcctgctgccaggcctgcaaagatgaggcaagtgagcaatcggatgaagaggaccgtgtgcagtcgctccatggggtgagacatcctcaggatccatgttccagtgatgctgggagaaagagaggcccgggcaccccagcccccactggcctcagcgcccctctgagcttcatccctcgccacttcatacccaagggagcaggcagcacaactgtcaagatcgtcctgaaggagaaacataagaaagcctgtgtgcatggcgggaagacgtactcccacggggaggtgtggcacccggccttccgtgccttcggccccttgccctgcatcctatgcacctgtgaggatggccgccaggactgccagcgtgtgacctgtcccaccgagtacccctgccgtcaccccgagaaagtggctgggaagtgctgcaagatttgcccagaggacaaagcagaccctggccacagtgagatcagttctaccaggtgtcccaaggcaccgggccgggtcctcgtccacacatcggtatccccaagcccagacaacctgcgtcgctttgccctggaacacgaggcctcggacctggtggagatctacctctggaagctggtaaaaggaatcttccacttgactcagatcaagaaagtcaggaagcaagacttccagaaagaggcacagcacttccgactgctcgctggcccccacgaaggtcactggaacgtcttcctagcccagaccctggagctgaaggtcacggccagtccagacaaagtgaccaagacataacaaagacctaacagttgcagatatgagctgtataattgctgttattatatattaataaataagaagttgcataaccatcaaaa

SEQ ID NO: 380 - DNA, 1219 bp, Homo sapiens
accttccccctttctttgatcgcctctcccttctgctggaccttccttcgtctctccatctctccctcctttccccgcgttctctttccacctttctcttcttcccaccttagacctcccttcctgccctcctttcctgcccaccgctgcttcctggcccttctccgaccccgctctagcagcagacctcctggggtctgtgggttgatctgtggcccctgtgcctccgtgtccttttcgtctcccttcctcccgactccgctcccggaccagcggcctgaccctggggaaaggatggttcccgaggtgagggtcctctcctccttgctgggactcgcgctgctctggttccccctggactcccacgctcgagcccgcccagacatgttctgccttttccatgggaagagatactcccccggcgagagctggcacccctacttggagccacaaggcctgatgtactgcctgcgctgtacctgctcagagggcgcccatgtgagttgttaccgcctccactgtccgcctgtccactgcccccagcctgtgacggagccacagcaatgctgtcccaagtgtgtggaacctcacactccctctggactccgggccccaccaaagtcctgccagcacaacgggaccatgtaccaacacggagagatcttcagtgcccatgagctgttcccctcccgcctgcccaaccagtgtgtcctctgcagctgcacagagggccagatctactgcgggctcacaacctgccccgaaccaggctgcccagcacccctcccgctgccagactcctgctgccaggcctgcaaagatgaggcaagtgagcaatcggatgaagaggaccgtgtgcagtcgctccatggggtgagacatcctcaggatccatgttccagtgatgctgggagaaagagaggcccgggcaccccagcccccactggcctcagcgcccctctgagcttcatccctcgccacttcatacccaagggagcaggcagcacaactgtcaagatcgtcctgaaggagaaacataagaaagaggacaaagcagaccctggccacagtgagatcagttctaccaggtgtcccaaggcaccgggccgggtcctcgtccacacatcggtatccccaagcccagacaacctgcgtcgctttgccctggaacacgaggcctcggacctggtggagatctacctctggaagctggtaaaag

SEQ ID NO: 381 - DNA, 1415 bp, Homo sapiens
ggacaaataaaaaggaaacaagcatgattgtgagggcagaggagcgtgggactgagtcaggagactggtgctgtcatcgctgcctggtgactgacttgctgtgtggccctcaggtgtaacttaccctctctgggcctcatttgtctaatcataataattaacgctgataccatgatataaatctgtacagcatttcactgcttgattccctaactgccctgtgagataagcgttaaggctcagagacagtggcatgcccagtgttgcacagtaagtgtgtggtaaagccgagattcaaactcagaccttctggccccttgcctaggagagcatgcccagttgtctagcagattctcttttgcctgagtggcccagatgacatctcttttagagctagaaagaaggagaaatgagacagggtctttgggctggagcctcctgggactaacatggcactggtcggtttgccaggcccagacatgttctgccttttccatgggaagagatactcccccggcgagagctggcacccctacttggagccacaaggcctgatgtactgcctgcgctgtacctgctcagagaacctcacactccctctggactccgggccccaccaaagtcctgccagcacaacgggaccatgtaccaacacggagagatcttcagtgcccatgagctgttcccctcccgcctgcccaaccagtgtgtcctctgcagctgcacagagggccagatctactgcggcctcacaacctgccccgaaccaggctgcccagcacccctcccgctgccagactcctgctgccaagcctgcaaagatgaggcaagtgagcaatcggatgaagaggacagtgtgcagtcgctccatggggtgagacatcctcaggatccatgttccagtgatgctgggagaaagagaggcccgggcaccccagcccccactggcctcagcgcccctctgagcttcatccctcgccacttcagacccaagggagcaggcagcacaactgtcaagatcgtcctgaaggagaaacataagaaagcctgtgtgcatggcgggaagacgtactcccacggggaggtgtggcacccggccttccgtgccttcggccccttgccctgcatcctatgcacctgtgaggatggccgccaggactgccagcgtgtgacctgtcccaccgagtacccctgccgtcaccccgagaaagtggctgggaagtgctgcaagatttgcccagaggacaaagcagaccctggccacagtgagatcagttctaccaggtgtcccaaggcaccgggccgggtcctcgtccacacatcggtatccccaagcccagacaacctgcgtcgctttgccctggaacacgaggcctcggacttggtggagatctacctctggaagctggtaaaag

SEQ ID NO: 382 - DNA, 1415 bp, Homo sapiens
ggacaaataaaaaggaaacaagcatgattgtgagggcagaggagcgtgggactgagtcaggagactggtgctgtcatcgctgcctggtgactgacttgctgtgtggccctcaggtgtaacttaccctctctgggcctcatttgtctaatcataataattaacgctgataccatgatataaatctgtacagcatttcactgcttgattccctaactgccctgtgagataagcgttaaggctcagagacagtggcatgcccagtgttgcacagtaagtgtgtggtaaagccgagattcaaactcagaccttctggccccttgcctaggagagcatgcccagttgtctagcagattctcttttgcctgagtggcccagatgacatctcttttagagctagaaagaaggagaaatgagacagggtctttgggctggagcctcctgggactaacatggcactggtcggtttgccaggcccagacatgttctgccttttccatgggaagagatactcccccggcgagagctggcacccctacttggagccacaaggcctgatgtactgcctgcgctgtacctgctcagagggcgcccatgtgagttgttaccgcctccactgtccgcctgtccactgcccccagcctgtgacggagccacagcaatgctgtcccaagtgtgtggaacctcacactccctctggactccgggccccaccaaagtcctgccagcacaacgggaccatgtaccaacacggagagatcttcagtgcccatgagctgttcccctcccgcctgcccaaccagtgtgtcctctgcagctgcacaatgaggcaagtgagcaatcggatgaagaggacagtgtgcagtcgctccatggggtgagacatcctcaggatccatgttccagtgatgctgggagaaagagaggcccgggcaccccagcccccactggcctcagcgcccctctgagcttcatccctcgccacttcagacccaagggagcaggcagcacaactgtcaagatcgtcctgaaggagaaacataagaaagcctgtgtgcatggcgggaagacgtactcccacggggaggtgtggcacccggccttccgtgccttcggccccttgccctgcatcctatgcacctgtgaggatggccgccaggactgccagcgtgtgacctgtcccaccgagtacccctgccgtcaccccgagaaagtggctgggaagtgctgcaagatttgcccagaggacaaagcagaccctggccacagtgagatcagttctaccaggtgtcccaaggcaccgggccgggtcctcgtccacacatcggtatccccaagcccagacaacctgcgtcgctttgccctggaacacgaggcctcggacttggtggagatctacctctggaagctggtaaaag

SEQ ID NO: 383 - DNA, 1321 bp, Homo sapiens
ggacaaataaaaaggaaacaagcatgattgtgagggcagaggagcgtgggactgagtcaggagactggtgctgtcatcgctgcctggtgactgacttgctgtgtggccctcaggtgtaacttaccctctctgggcctcatttgtctaatcataataattaacgctgataccatgatataaatctgtacagcatttcactgcttgattccctaactgccctgtgagataagcgttaaggctcagagacagtggcatgcccagtgttgcacagtaagtgtgtggtaaagccgagattcaaactcagaccttctggccccttgcctaggagagcatgcccagttgtctagcagattctcttttgcctgagtggcccagatgacatctcttttagagctagaaagaaggagaaatgagacagggtctttgggctggagcctcctgggactaacatggcactggtcggtttgccaggcccagacatgttctgccttttccatgggaagagatactcccccggcgagagctggcacccctacttggagccacaaggcctgatgtactgcctgcgctgtacctgctcagagaacctcacactccctctggactccgggccccaccaaagtcctgccagcacaacgggaccatgtaccaacacggagagatcttcagtgcccatgagctgttcccctcccgcctgcccaaccagtgtgtcctctgcagctgcacaatgaggcaagtgagcaatcggatgaagaggacagtgtgcagtcgctccatggggtgagacatcctcaggatccatgttccagtgatgctgggagaaagagaggcccgggcaccccagcccccactggcctcagcgcccctctgagcttcatccctcgccacttcagacccaagggagcaggcagcacaactgtcaagatcgtcctgaaggagaaacataagaaagcctgtgtgcatggcgggaagacgtactcccacggggaggtgtggcacccggccttccgtgccttcggccccttgccctgcatcctatgcacctgtgaggatggccgccaggactgccagcgtgtgacctgtcccaccgagtacccctgccgtcaccccgagaaagtggctgggaagtgctgcaagatttgcccagaggacaaagcagaccctggccacagtgagatcagttctaccaggtgtcccaaggcaccgggccgggtcctcgtccacacatcggtatccccaagcccagacaacctgcgtcgctttgccctggaacacgaggcctcggacttggtggagatctacctctggaagctggtaaaag

SEQ ID NO: 384 - DNA, 1722 bp, Homo sapiens
accttccccctttctttgatcgcctctcccttctgctggaccttccttcgtctctccatctctccctcctttccccgcgttctctttccacctttctcttcttcccaccttagacctcccttcctgccctcctttcctgcccaccgctgcttcctggcccttctccgaccccgctctagcagcagacctcctggggtctgtgggttgatctgtggcccctgtgcctccgtgtccttttcgtctcccttcctcccgactccgctcccggaccagcggcctgaccctggggaaaggatggttcccgaggtgagggtcctctcctccttgctgggactcgcgctgctctggttccccctggactcccacgctcgagcccgcccagacatgttctgccttttccatgggaagagatactcccccggcgagagctggcacccctacttggagccacaaggcctgatgtactgcctgcgctgtacctgctcagagggcgcccatgtgagttgttaccgcctccactgtccgcctgtccactgcccccagcctgtgacggagccacagcaatgctgtcccaagtgtgtggaacctcacactccctctggactccgggccccaccaaagtcctgccagcacaacgggaccatgtaccaacacggagagatcttcagtgcccatgagctgttcccctcccgcctgcccaaccagtgtgtcctctgcagctgcacagagggccagatctactgcgggctcacaacctgccccgaaccaggctgcccagcacccctcccgctgccagactcctgctgccaggcctgcaaagatgaggcaagtgagcaatcggatgaagaggacagtgtgcagtcgctccatggggtgagacatcctcaggatccatgttccagtgatgctgggagaaagagaggcccgggcaccccagcccccactggcctcagcgcccctctgagcttcatccctcgccacttcagacccaagggagcaggcagcacaactgtcaagatcgtcctgaaggagaaacataagaaagcctgtgtgcatggcgggaagacgtactcccacggggaggtgtggcacccggccttccgtgccttcggccccttgccctgcatcctatgcacctgtgaggatggccgccaggactgccagcgtgtgacctgtcccaccgagtacccctgccgtcaccccgagaaagtggctgggaagtgctgcaagatttgcccagaggacaaagcagaccctggccacagtgagatcagttctaccaggtgtcccaaggcaccgggccgggtcctcgtccacacatcggtatccccaagcccagacaacctgcgtcgctttgccctggaacacgaggcctcggacctggtggagatctacctctggaagctggtaaaagatgaggaaactgaggctcagagaggtgaagtacctggcccaaggccacacagccagaatcttccacttgactcagatcaagaaagtcaggaagcaagacttccagaaagaggcacagcacttccgactgctcgctggcccccacgaaggtcactggaacgtcttcctagcccagaccctggagctgaaggtcacggccagtccagacaaagtgaccaagacataacaaagacctaacagttgcagatatgagctgtataattgctgttattatatattaataaataagaagttgcataaccatcaaaa

SEQ ID NO: 385 - DNA, 1817 bp, Homo sapiens
ggacaaataaaaaggaaacaagcatgattgtgagggcagaggagcgtgggactgagtcaggagactggtgctgtcatcgctgcctggtgactgacttgctgtgtggccctcaggtgtaacttaccctctctgggcctcatttgtctaatcataataattaacgctgataccatgatataaatctgtacagcatttcactgcttgattccctaactgccctgtgagataagcgttaaggctcagagacagtggcatgcccagtgttgcacagtaagtgtgtggtaaagccgagattcaaactcagaccttctggccccttgcctaggagagcatgcccagttgtctagcagattctcttttgcctgagtggcccagatgacatctcttttagagctagaaagaaggagaaatgagacagggtctttgggctggagcctcctgggactaacatggcactggtcggtttgccaggcccagacatgttctgccttttccatgggaagagatactcccccggcgagagctggcacccctacttggagccacaaggcctgatgtactgcctgcgctgtacctgctcagagggcgcccatgtgagttgttaccgcctccactgtccgcctgtccactgcccccagcctgtgacggagccacagcaatgctgtcccaagtgtgtggaacctcacactccctctggactccgggccccaccaaagtcctgccagcacaacgggaccatgtaccaacacggagagatcttcagtgcccatgagctgttcccctcccgcctgcccaaccagtgtgtcctctgcagctgcacagagggccagatctactgcggcctcacaacctgccccgaaccaggctgcccagcacccctcccgctgccagactcctgctgccaagcctgcaaagatgaggcaagtgagcaatcggatgaagaggacagtgtgcagtcgctccatggggtgagacatcctcaggatccatgttccagtgatgctgggagaaagagaggcccgggcaccccagcccccactggcctcagcgcccctctgagcttcatccctcgccacttcagacccaagggagcaggcagcacaactgtcaagatcgtcctgaaggagaaacataagaaagcctgtgtgcatggcgggaagacgtactcccacggggaggtgtggcacccggccttccgtgccttcggccccttgccctgcatcctatgcacctgtgaggatggccgccaggactgccagcgtgtgacctgtcccaccgagtacccctgccgtcaccccgagaaagtggctgggaagtgctgcaagatttgcccagaggacaaagcagaccctggccacagtgagatcagttctaccaggtgtcccaaggcaccgggccgggtcctcgtccacacatcggtatccccaagcccagacaacctgcgtcgctttgccctggaacacgaggcctcggacttggtggagatctacctctggaagctggtaaaagatgaggaaactgaggctcagagaggtgaagtacctggcccaaggccacacagccagaatcttccacttgactcagatcaagaaagtcaggaagcaagacttccagaaagaggcacagcacttccgactgctcgctggcccccacgaaggtcactggaacgtcttcctagcccagaccctggagctgaaggtcacggccagtccagacaaagtgaccaagacataacaaagacctaacagttgcagatatgagctgtataattgttgttattatatattaataaataagaagttgcataaccatcaaaa

SEQ ID NO: 386 - DNA, 1622 bp, Homo sapiens
ggacaaataaaaaggaaacaagcatgattgtgagggcagaggagcgtgggactgagtcaggagactggtgctgtcatcgctgcctggtgactgacttgctgtgtggccctcaggtgtaacttaccctctctgggcctcatttgtctaatcataataattaacgctgataccatgatataaatctgtacagcatttcactgcttgattccctaactgccctgtgagataagcgttaaggctcagagacagtggcatgcccagtgttgcacagtaagtgtgtggtaaagccgagattcaaactcagaccttctggccccttgcctaggagagcatgcccagttgtctagcagattctcttttgcctgagtggcccagatgacatctcttttagagctagaaagaaggagaaatgagacagggtctttgggctggagcctcctgggactaacatggcactggtcggtttgccaggcccagacatgttctgccttttccatgggaagagatactcccccggcgagagctggcacccctacttggagccacaaggcctgatgtactgcctgcgctgtacctgctcagagggcgcccatgtgagttgttaccgcctccactgtccgcctgtccactgcccccagcctgtgacggagccacagcaatgctgtcccaagtgtgtggaacctcacactccctctggactccgggccccaccaaagtcctgccagcacaacgggaccatgtaccaacacggagagatcttcagtgcccatgagctgttcccctcccgcctgcccaaccagtgtgtcctctgcagctgcacagagggccagatctactgcggcctcacaacctgccccgaaccaggctgcccagcacccctcccgctgccagactcctgctgccaagcctgcaaagatgaggcaagtgagcaatcggatgaagaggacagtgtgcagtcgctccatggggtgagacatcctcaggatccatgttccagtgatgctgggagaaagagaggcccgggcaccccagcccccactggcctcagcgcccctctgagcttcatccctcgccacttcagacccaagggagcaggcagcacaactgtcaagatcgtcctgaaggagaaacataagaaagaggacaaagcagaccctggccacagtgagatcagttctaccaggtgtcccaaggcaccgggccgggtcctcgtccacacatcggtatccccaagcccagacaacctgcgtcgctttgccctggaacacgaggcctcggacttggtggagatctacctctggaagctggtaaaagatgaggaaactgaggctcagagaggtgaagtacctggcccaaggccacacagccagaatcttccacttgactcagatcaagaaagtcaggaagcaagacttccagaaagaggcacagcacttccgactgctcgctggcccccacgaaggtcactggaacgtcttcctagcccagaccctggagctgaaggtcacggccagtccagacaaagtgaccaagacataacaaagacctaacagttgcagatatgagctgtataattgttgttattatatattaataaataagaagttgcataaccatcaaaa

SEQ ID NO: 387 - DNA, 1567 bp, Homo sapiens
ggacaaataaaaaggaaacaagcatgattgtgagggcagaggagcgtgggactgagtcaggagactggtgctgtcatcgctgcctggtgactgacttgctgtgtggccctcaggtgtaacttaccctctctgggcctcatttgtctaatcataataattaacgctgataccatgatataaatctgtacagcatttcactgcttgattccctaactgccctgtgagataagcgttaaggctcagagacagtggcatgcccagtgttgcacagtaagtgtgtggtaaagccgagattcaaactcagaccttctggccccttgcctaggagagcatgcccagttgtctagcagattctcttttgcctgagtggcccagatgacatctcttttagagctagaaagaaggagaaatgagacagggtctttgggctggagcctcctgggactaacatggcactggtcggtttgccaggcccagacatgttctgccttttccatgggaagagatactcccccggcgagagctggcacccctacttggagccacaaggcctgatgtactgcctgcgctgtacctgctcagagggcgcccatgtgagttgttaccgcctccactgtccgcctgtccactgcccccagcctgtgacggagccacagcaatgctgtcccaagtgtgtggaacctcacactccctctggactccgggccccaccaaagtcctgccagcacaacgggaccatgtaccaacacggagagatcttcagtgcccatgagctgttcccctcccgcctgcccaaccagtgtgtcctctgcagctgcacagagggccagatctactgcggcctcacaacctgccccgaaccaggctgcccagcacccctcccgctgccagactcctgctgccaagcctgcaaagatgaggcaagtgagcaatcggatgaagaggacagtgtgcagtcgctccatggggtgagacatcctcaggatccatgttccagtgatgctgggagaaagagaggcccgggcaccccagcccccactggcctcagcgcccctctgagcttcatccctcgccacttcagacccaagggagcaggcagcacaactgtcaagatcgtcctgaaggagaaacataagaaagaggacaaagcagaccctggccacagtgagatcagttctaccaggtgtcccaaggcaccgggccgggtcctcgtccacacatcggtatccccaagcccagacaacctgcgtcgctttgccctggaacacgaggcctcggacttggtggagatctacctctggaagctggtaaaaggaatcttccacttgactcagatcaagaaagtcaggaagcaagacttccagaaagaggcacagcacttccgactgctcgctggcccccacgaaggtcactggaacgtcttcctagcccagaccctggagctgaaggtcacggccagtccagacaaagtgaccaagacataacaaagacctaacagttgcagatatgagctgtataattgttgttattatatattaataaataagaagttgcataaccatcaaaa

SEQ ID NO: 388 - DNA, 1515 bp, Homo sapiens
agaacagtgcctggcactgagaagtgctccatgaaccctcattaaatgctggatgaactaactcgggccccactgagcggaagctgaggctgccggctttaccttcttgctctggttggggctggcccagacactgagggggctggagggctgtggtagaggtcatgggagggagggactcagtcagatgtaggtatcagagggacctcttagttagctgataaggggaatggctggcaaggcccaggccagagcttggtttaaatatcaagctggggtcaaatgcaaaatcatcagaaaagtggccttgttaatttcagcaaagattcacatgaaacctcattttcttcttcctcctgcccctcccccactgcagaacctcacactccctctggactccgggccccaccaaagtcctgccagcacaacgggaccatgtaccaacacggagagatcttcagtgcccatgagctgttcccctcccgcctgcccaaccagtgtgtcctctgcagctgcacagagggccagatctactgcggcctcacaacctgccccgaaccaggctgcccagcacccctcccgctgccagactcctgctgccaggcctgcaaagatgaggcaagtgagcaatcggatgaagaggacagtgtgcagtcgctccatggggtgagacatcctcaggatccatgttccagtgatgctgggagaaagagaggcccgggcaccccagcccccactggcctcagcgcccctctgagcttcatccctcgccacttcagacccaagggagcaggcagcacaactgtcaagatcgtcctgaaggagaaacataagaaagcctgtgtgcatggcgggaagacgtactcccacggggaggtgtggcacccggccttccgtgccttcggccccttgccctgcatcctatgcacctgtgaggatggccgccaggactgccagcgtgtgacctgtcccaccgagtacccctgccgtcaccccgagaaagtggctgggaagtgctgcaagatttgcccagaggacaaagcagaccctggccacagtgagatcagttctaccaggtgtcccaaggcaccgggccgggtcctcgtccacacatcggtatccccaagcccagacaacctgcgtcgctttgccctggaacacgaggcctcggacttggtggagatctacctctggaagctggtaaaagatgaggaaactgaggctcagagaggtgaagtacctggcccaaggccacacagccagaatcttccacttgactcagatcaagaaagtcaggaagcaagacttccagaaagaggcacagcacttccgactgctcgctggcccccacgaaggtcactggaacgtcttcctagcccagaccctggagctgaaggtcacggccagtccagacaaagtgaccaagacataacaaagacctaacagttgcagatatgagctgtataattgttgttattatatattaataaataagaagttgcataaccatcaaaa

SEQ ID NO: 389 - protein, 429 aa, Homo sapiens
MVPEVRVLSSLLGLALLWFPLDSHARARPDMFCLFHGKRYSPGESWHPYLEPQGLMYCLRCTCSEGAHVSCYRLHCPPVHCPQPVTEPQQCCPKCVEPHTPSGLRAPPKSCQHNGTMYQHGEIFSAHELFPSRLPNQCVLCSCTEGQIYCGLTTCPEPGCPAPLPLPDSCCQACKDEASEQSDEEDSVQSLHGVRHPQDPCSSDAGRKRGPGTPAPTGLSAPLSFIPRHFRPKGAGSTTVKIVLKEKHKKACVHGGKTYSHGEVWHPAFRAFGPLPCILCTCEDGRQDCQRVTCPTEYPCRHPEKVAGKCCKICPEDKADPGHSEISSTRCPKAPGRVLVHTSVSPSPDNLRRFALEHEASDLVEIYLWKLVKGIFHLTQIKKVRKQDFQKEAQHFRLLAGPHEGHWNVFLAQTLELKVTASPDKVTKT

SEQ ID NO: 390 - protein, 308 aa, Homo sapiens
MVPEVRVLSSLLGLALLWFPLDSHARARPDMFCLFHGKRYSPGESWHPYLEPQGLMYCLRCTCSEGAHVSCYRLHCPPVHCPQPVTEPQQCCPKCVEPHTPSGLRAPPKSCQHNGTMYQHGEIFSAHELFPSRLPNQCVLCSCTEGQIYCGLTTCPEPGCPAPLPLPDSCCQACKDEASEQSDEEDSVQSLHGVRHPQDPCSSDAGRKRGPGTPAPTGLSAPLSFIPRHFRPKGAGSTTVKIVLKEKHKKEDKADPGHSEISSTRCPKAPGRVLVHTSVSPSPDNLRRFALEHEASDLVEIYLWKLVK

SEQ ID NO: 391 - protein, 142 aa, Homo sapiens
MALVGLPGPDMFCLFHGKRYSPGESWHPYLEPQGLMYCLRCTCSENLTLPLDSGPHQSPASTTGPCTNTERSSVPMSCSPPACPTSVSSAAAQRARSTAASQPAPNQAAQHPSRCQTPAAKPAKMRQVSNRMKRTVCSRSMG

SEQ ID NO: 392 - protein, 142 aa, Homo sapiens
MALVGLPGPDMFCLFHGKRYSPGESWHPYLEPQGLMYCLRCTCSEGAHVSCYRLHCPPVHCPQPVTEPQQCCPKCVEPHTPSGLRAPPKSCQHNGTMYQHGEIFSAHELFPSRLPNQCVLCSCTMRQVSNRMKRTVCSRSMG

SEQ ID NO: 393 - protein, 93 aa, Homo sapiens
MALVGLPGPDMFCLFHGKRYSPGESWHPYLEPQGLMYCLRCTCSENLTLPLDSGPHQSPASTTGPCTNTERSSVPMSCSPPACPTSVSSAAAQ

SEQ ID NO: 394 - protein, 451 aa, Homo sapiens
MVPEVRVLSSLLGLALLWFPLDSHARARPDMFCLFHGKRYSPGESWHPYLEPQGLMYCLRCTCSEGAHVSCYRLHCPPVHCPQPVTEPQQCCPKCVEPHTPSGLRAPPKSCQHNGTMYQHGEIFSAHELFPSRLPNQCVLCSCTEGQIYCGLTTCPEPGCPAPLPLPDSCCQACKDEASEQSDEEDRVQSLHGVRHPQDPCSSDAGRKRGPGTPAPTGLSAPLSFIPRHFIPKGAGSTTVKIVLKEKHKKACVHGGKTYSHGEVWHPAFRAFGPLPCILCTCEDGRQDCQRVTCPTEYPCRHPEKVAGKCCKICPEDKADPGHSEISSTRCPKAPGRVLVHTSVSPSPDNLRRFALEHEASDLVEIYLWKLVKDEETEAQRGEVPGPRPHSQNLPLDSDQESQEARLPERGTALPTARWPPRRSLERLPSPDPGAEGHGQSRQSDQDITKT

SEQ ID NO: 395 - protein, 431 aa, Homo sapiens
MALVGLPGPDMFCLFHGKRYSPGESWHPYLEPQGLMYCLRCTCSEGAHVSCYRLHCPPVHCPQPVTEPQQCCPKCVEPHTPSGLRAPPKSCQHNGTMYQHGEIFSAHELFPSRLPNQCVLCSCTEGQIYCGLTTCPEPGCPAPLPLPDSCCQACKDEASEQSDEEDSVQSLHGVRHPQDPCSSDAGRKRGPGTPAPTGLSAPLSFIPRHFRPKGAGSTTVKIVLKEKHKKACVHGGKTYSHGEVWHPAFRAFGPLPCILCTCEDGRQDCQRVTCPTEYPCRHPEKVAGKCCKICPEDKADPGHSEISSTRCPKAPGRVLVHTSVSPSPDNLRRFALEHEASDLVEIYLWKLVKDEETEAQRGEVPGPRPHSQNLPLDSDQESQEARLPERGTALPTARWPPRRSLERLPSPDPGAEGHGQSRQSDQDITKT

SEQ ID NO: 396 - protein, 366 aa, Homo sapiens
MALVGLPGPDMFCLFHGKRYSPGESWHPYLEPQGLMYCLRCTCSEGAHVSCYRLHCPPVHCPQPVTEPQQCCPKCVEPHTPSGLRAPPKSCQHNGTMYQHGEIFSAHELFPSRLPNQCVLCSCTEGQIYCGLTTCPEPGCPAPLPLPDSCCQACKDEASEQSDEEDSVQSLHGVRHPQDPCSSDAGRKRGPGTPAPTGLSAPLSFIPRHFRPKGAGSTTVKIVLKEKHKKEDKADPGHSEISSTRCPKAPGRVLVHTSVSPSPDNLRRFALEHEASDLVEIYLWKLVKDEETEAQRGEVPGPRPHSQNLPLDSDQESQEARLPERGTALPTARWPPRRSLERLPSPDPGAEGHGQSRQSDQDITKT

SEQ ID NO: 397 - protein, 344 aa, Homo sapiens
MALVGLPGPDMFCLFHGKRYSPGESWHPYLEPQGLMYCLRCTCSEGAHVSCYRLHCPPVHCPQPVTEPQQCCPKCVEPHTPSGLRAPPKSCQHNGTMYQHGEIFSAHELFPSRLPNQCVLCSCTEGQIYCGLTTCPEPGCPAPLPLPDSCCQACKDEASEQSDEEDSVQSLHGVRHPQDPCSSDAGRKRGPGTPAPTGLSAPLSFIPRHFRPKGAGSTTVKIVLKEKHKKEDKADPGHSEISSTRCPKAPGRVLVHTSVSPSPDNLRRFALEHEASDLVEIYLWKLVKGIFHLTQIKKVRKQDFQKEAQHFRLLAGPHEGHWNVFLAQTLELKVTASPDKVTKT

SEQ ID NO: 398 - protein, 386 aa, Homo sapiens
MQNHQKSGLVNFSKDSHETSFSSSSCPSPTAEPHTPSGLRAPPKSCQHNGTMYQHGEIFSAHELFPSRLPNQCVLCSCTEGQIYCGLTTCPEPGCPAPLPLPDSCCQACKDEASEQSDEEDSVQSLHGVRHPQDPCSSDAGRKRGPGTPAPTGLSAPLSFIPRHFRPKGAGSTTVKIVLKEKHKKACVHGGKTYSHGEVWHPAFRAFGPLPCILCTCEDGRQDCQRVTCPTEYPCRHPEKVAGKCCKICPEDKADPGHSEISSTRCPKAPGRVLVHTSVSPSPDNLRRFALEHEASDLVEIYLWKLVKDEETEAQRGEVPGPRPHSQNLPLDSDQESQEARLPERGTALPTARWPPRRSLERLPSPDPGAEGHGQSRQSDQDITKT

SEQ ID NO: 399 - DNA, 23 bp, Homo sapiens
cagcggcctgaccctggggaaag

SEQ ID NO: 400 - DNA, 24 bp, Homo sapiens
ctgcttgattccctaactgccctg

SEQ ID NO: 401 - DNA, 23 bp, Homo sapiens
cagagggacctcttagttagctg

SEQ ID NO: 402 - DNA, 27 bp, Homo sapiens
ctgaagatctctccgtgttggtacatg

SEQ ID NO: 403 - DNA, 23 bp, Homo sapiens
cagtgatgctgggagaaagagag

SEQ ID NO: 404 - DNA, 24 bp, Homo sapiens
agggtctgctttgtcctctttctt

SEQ ID NO: 405 - DNA, 27 bp, Homo sapiens
cacctggtagaactgatctcactgtgg

SEQ ID NO: 406 - DNA, 23 bp, Homo sapiens
agctcatatctgcaactgttagg

SEQ ID NO: 407 - DNA, 21 bp, Homo sapiens
gaaagcctgtgtgcatggcgg

SEQ ID NO: 408 - DNA, 23 bp, Mus musculus
atctcactttctcccggctcatc

SEQ ID NO: 409 - DNA, 24 bp, Mus musculus
gttgcgcattcttgtattcaggag

SEQ ID NO: 410 - DNA, 23 bp, Mus musculus
atcacaggctgtgagcagtgaag

SEQ ID NO: 411 - DNA, 23 bp, Mus musculus
ttcaggacaggtcatgagaccac

SEQ ID NO: 412 - DNA, 22 bp, Mus musculus
aggatccatgctcggagaccag

SEQ ID NO: 413 - DNA, 22 bp, Mus musculus
catgctccaggacaaagcggtg

SEQ ID NO: 414 - DNA, 20 bp, Homo sapiens
ctcacactcctcgccctatt

SEQ ID NO: 415 - DNA, 20 bp, Homo sapiens
gactggggctcccagccatt

SEQ ID NO: 416 - DNA, 23 bp, Mus musculus
gacaagtcccacacagcagcttg

SEQ ID NO: 417 - DNA, 22 bp, Mus musculus
cagccaaagccgagctgccaga

SEQ ID NO: 418 - DNA, 24 bp, Mus musculus
acgaaaccatgcccaactgagatt

SEQ ID NO: 419 - DNA, 24 bp, Mus musculus
agaggctttggaaccggatagctc

SEQ ID NO: 420 - DNA, 25 bp, Homo sapiens
cagtgattataggctttcgctctaa

SEQ ID NO: 421 - DNA, 23 bp, Homo sapiens
cagggctattggttgaatgagta

SEQ ID NO: 422 - DNA, 24 bp, Homo sapiens
tggcattacgaacctttggccact

SEQ ID NO: 423 - DNA, 24 bp, Homo sapiens
cattgcagccagacgggcattatt

SEQ ID NO: 424 - DNA, 22 bp, Mus musculus
tcgtggagtctactggcgtctt

SEQ ID NO: 425 - DNA, 22 bp, Homo sapiens
tggcagtgatggcatggactgt

SEQ ID NO: 426 - DNA, 1516 bp, Mus musculus
ctcttcatctttgcttttccgactcctcaagcagcggtcctacttggtcctctgaggacttacttgtgtccttatctcactttctcccggctcatcccggggttgtctgaccttgggacaaggaaggatggttcccggggtgaggatcatcccctctttgctgggactcgtgatgttctggctcccgttggactcacaagcacgatcccgctcgggcaaagtctgccttttcggtgaaaagatatatacccccggccagagctggcacccctacttggaaccacaaggcacgatatactgcgtgcgctgtacctgctctgagaatggacatgtgaattgttaccgcctccgctgcccaccccttcactgctcacagcctgtgatggagccacagcaatgctgtcccaggtgtgtggatcctcatgtcccctctggcctccgagttcccctaaagtcctgccagctcaatgagaccacataccaacatggagagatcttcagtgcccaggagctgttccctgcccgcctgtccaaccagtgtgtcctgtgtagctgtattgaaggccacacttactgtggtctcatgacctgtcctgaacccagctgccccaccacactccctctgcctgattcctgctgtcagacctgcaaagacaggacaactgagagctccacagaagaaaacttgacacagctgcagcatggagagagacattcccaggatccatgctcggagaggagaggccccagcacgccagcccccaccagcctcagctcccctctgggcttcatccctcgccacttccagtcagtaggaatgggcagcacaaccatcaagattatcttgaaggagaaacataaaaaagcttgcacacacaatgggaagacatactcccatggggaggtgtggcaccccactgtgctctcctttggccccatgccctgcatcctgtgcacatgtatcgatggctaccaggactgccaccgtgtgacctgccccacccaatatccctgcagtcaacccaagaaagtggctgggaagtgctgcaagatctgcccagaggacgaggcggaagatgaccacagtgaggtcatttccacccggtgtcccaaggtaccaggccagttccatgtgtacacgttggcatctccaagcccagacagcctacaccgctttgtcctggagcatgaagcctctgaccaggtagagatgtacatttggaagctggtgaaaggaatctaccacttggttcagatcaagagagtcaggaagcaagatttccagaaagaggctcagaacttccggctgctcaccggcacccatgaaggttactggaccgtcttcctagcccagactccagagctgaaagttacagccagcccagacaaagtgaccaagacattatagcaaggacctaaagagttgcagatacgagttttattggttttgttattatatattaataaagaagtcgcattaccctcaaaaaaaaaaaaaaaaaaaaaaaaaaaaaaa

SEQ ID NO: 427 - protein, 426 aa, Mus musculus
MVPGVRIIPSLLGLVMFWLPLDSQARSRSGKVCLFGEKIYTPGQSWHPYLEPQGTIYCVRCTCSENGHVNCYRLRCPPLHCSQPVMEPQQCCPRCVDPHVPSGLRVPLKSCQLNETTYQHGEIFSAQELFPARLSNQCVLCSCIEGHTYCGLMTCPEPSCPTTLPLPDSCCQTCKDRTTESSTEENLTQLQHGERHSQDPCSERRGPSTPAPTSLSSPLGFIPRHFQSVGMGSTTIKIILKEKHKKACTHNGKTYSHGEVWHPTVLSFGPMPCILCTCIDGYQDCHRVTCPTQYPCSQPKKVAGKCCKICPEDEAEDDHSEVISTRCPKVPGQFHVYTLASPSPDSLHRFVLEHEASDQVEMYIWKLVKGIYHLVQIKRVRKQDFQKEAQNFRLLTGTHEGYWTVFLAQTPELKVTASPDKVTKTL

SEQ ID NO: 428 - DNA, 21 bp, Artificial Sequence
  HPRT1-Forward primer
tgacactggcaaaacaatgca

SEQ ID NO: 429 - DNA, 21 bp, Artificial Sequence
  HPRT1-Reverse primer
ggtccttttcaccagcaagct

SEQ ID NO: 430 - DNA, 94 bp, Artificial Sequence
  HPRT1 amplicon
tgacactggcaaaacaatgcagactttgctttccttggtcaggcagtataatccaaagatggtcaaggtcgcaagcttgctggtgaaaaggacc

SEQ ID NO: 431 - DNA, 19 bp, Artificial Sequence
  PBGD-Forward primer
tgagagtgattcgcgtggg

SEQ ID NO: 432 - DNA, 21 bp, Artificial Sequence
  PBGD-Reverse priimer
ccagggtacgaggctttcaat

SEQ ID NO: 433 - DNA, 91 bp, Artificial Sequence
  PBGD amplicon
tgagagtgattcgcgtgggtacccgcaagagccagcttgctcgcatacagacggacagtgtggtggcaacattgaaagcctcgtaccctgg

SEQ ID NO: 434 - DNA, 20 bp, Artificial Sequence
  SDHA-Forward primer
tgggaacaagagggcatctg

SEQ ID NO: 435 - DNA, 22 bp, Artificial Sequence
  SDHA-Reverse primer
ccaccactgcatcaaattcatg

SEQ ID NO: 436 - DNA, 86 bp, Artificial Sequence
  SDHA amplicon
tgggaacaagagggcatctgctaaagtttcagattccatttctgctcagtatccagtagtggatcatgaatttgatgcagtggtgg

SEQ ID NO: 437 - DNA, 20 bp, Artificial Sequence
  G6PD-Forward primer
gaggccgtcaccaagaacat

SEQ ID NO: 438 - DNA, 19 bp, Artificial Sequence
  G6PD-Reverse primer
ggacagccggtcagagctc

SEQ ID NO: 439 - DNA, 111 bp, Artificial Sequence
  G6PD amplicon
gaggccgtcaccaagaacattcacgagtcctgcatgagccagataggctggaaccgcatcatcgtggagaagcccttcgggagggacctgcagagctctgaccggctgtcc

SEQ ID NO: 440 - DNA, 20 bp, Artificial Sequence
  Exon 2a-Forward primer
aacatggcactggtcggttt

SEQ ID NO: 441 - DNA, 18 bp, Artificial Sequence
  Exon 2a-Reverse primer
cggacagtggaggcggta

SEQ ID NO: 442 - DNA, 174 bp, Artificial Sequence
  amplicon exon 2a
aacatggcactggtcggtttgccaggcccagacatgttctgccttttccatgggaagagatactcccccggcgagagctggcacccctacttggagccacaaggcctgatgtactgcctgcgctgtacctgctcagagggcgcccatgtgagttgttaccgcctccactgtccg

SEQ ID NO: 443 - DNA, 19 bp, Artificial Sequence
  Ubiquitin-Forward primer
atttgggtcgcggttcttg

SEQ ID NO: 444 - DNA, 21 bp, Artificial Sequence
  Ubiquitin-Reverse primer
tgccttgacattctcgatggt

SEQ ID NO: 445 - DNA, 133 bp, Artificial Sequence
  Ubiquitin Amplicon
atttgggtcgcggttcttgtttgtggatcgctgtgatcgtcacttgacaatgcagatcttcgtgaagactctgactggtaagaccatcaccctcgaggttgagcccagtgacaccatcgagaatgtcaaggca

SEQ ID NO: 446 - DNA, 25 bp, Artificial Sequence
  Exon 4a Forward primer
aaacctcattttcttcttcctcctg

SEQ ID NO: 447 - DNA, 27 bp, Artificial Sequence
  Exon 4a-Reverse primer
ctgaagatctctccgtgttggtacatg

SEQ ID NO: 448 - DNA, 127 bp, Artificial Sequence
  Exon 4a- amplicon
aaacctcattttcttcttcctcctgcccctcccccactgcagaacctcacactccctctggactccgggccccaccaaagtcctgccagcacaacgggaccatgtaccaacacggagagatcttcag

SEQ ID NO: 449 - DNA, 23 bp, Artificial Sequence
  RPL-19-Forward primer
tggcaagaagaaggtctggttag

SEQ ID NO: 450 - DNA, 22 bp, Artificial Sequence
  RPL-19-Reverse primer
tgatcagcccatctttgatgag

SEQ ID NO: 451 - DNA, 101 bp, Artificial Sequence
  RPL-19 amplicon
tggcaagaagaaggtctggttagaccccaatgagaccaatgaaatcgccaatgccaactcccgtcagcagatccggaagctcatcaaagatgggctgatca

SEQ ID NO: 452 - DNA, 1281 bp, Homo sapiens
  misc_feature (600)..(600): n is any nucleic acid
cagggagccacaaggcctgatgtactgcctgcgctgtacctgctcagagggcgcccatgtgagttgttaccgcctccactgtccgcctgtccactgcccccagcctgtgacggagccacagcaatgctgtcccaagtgtgtggaacctcacactccctctggactccgggccccaccaaagtcctgccagcacaacgggaccatgtaccaacacggagagatcttcagtgcccatgagctgttcccctcccgcctgcccaaccagtgtgtcctctgcagctgcacagagggccagatctactgcggcctcacaacctgccccgaaccaggctgcccagcacccctcccgctgccagactcctgctgccaagcctgcaaagatgaggcaagtgagcaatcggatgaagaggacagtgtgcagtcgctccatggggtgagacatcctcaggatccatgttccagtgatgctgggagaaagagaggcccgggcaccccagcccccactggcctcagcgcccctctgagcttcatccctcgccacttcagacccaagggagcaggcagcacaactgtcaagatcgtcctgaaggagaaacatangaaagcctgtgtgcatggcgggaagacgtactcccacggggaggtgtggcacccggccttccgtgccttcggcccttgcccatgcatcctatgcacctgtgaggatggccgccaggactgccagcgtgtgacctgtcccacgaagtacccctgccgtcaccccgagaaagtggctgggaagtgctgcaagatttgcccagaggacaaagcagaccctggccacagtgagatcagttctaccaggtgtcccaaggcaccgggccgggtcctcgtccacacatcggtatccccaagcccagacaacctgcgtcgctttgccctggaacacgaggcctcggacttggtggagatctacctctggaagctggtaaaagatgaggaaactgaggctcagagaggtgaagtacctggcccaaggccacacagccagaatttccacttgactcagatcaagaaagtcaggaagcaagacttccagaaagaggcacagcacttccgactgctcgctggcccccacgaaggtcactggaacgtcttcctagcccagaccctggagctgaaggtcacggccagtccagacaaagtgaccaagacataacaaagacctaacagttgcagatatgagctgtataattgttgttattatatattaataaataagaagttgcataaccatcaaaa

SEQ ID NO: 453 - DNA, 1722 bp, Homo sapiens
  misc_feature (1)..(1042): n is any nucleic acid
accttccccctttctttgatcgcctctcccttctgctggaccttccttcgtctctccatctctccctcctttccccgcgttctctttccacctttctcttcttcccaccttagacctcccttcctgccctcctttcctgcccaccgctgcttcctggcccttctccgaccccgctctagcagcagacctcctggggtcatgtgggttgatctgtggcccctgtgnctccgtgtccttttcgtctcccgtcctcccgactccgctcccggaccagcggcctgaccctggggaaaggatggttcccgaggtgagggtcctctcctccttgctgggactcgcgctgctctggttccccctggactcccacgctcgagcccgcccagacatgttctgccttttccatgggaagagatactcccccggcgagagctggcacccctacttggagccacaaggcctgatgtactgcctgcgctgtacctgctcagagggcgcccatgtgagttgttaccgcctccactgtccgcctgtccactgcccccagcctgtgacggagccacagcaatgctgtcccaagtgtgtggaacctcacactccctctggactccgggccccaccaaagtcctgccagcacaacgggaccatgtaccaacacggagagatcttcagtgcccatgagctgttcccctcccgcctgcccaaccagtgtgtcctctgcagctgcacagagggccagatctactgcggcctcacaacctgccccgaaccaggctgcccagcacccctcccgctgccagactcctgctgccaagcctgcaaagatgaggcaagtgagcaatcggatgaagaggacagtgtgcagtcgctccatggggtgagacatcctcaggatccatgttccagtgatgctgggagaaagagaggcccgggcaccccagcccccactggcctcagcgcccctctgagcttcatccctcgccacttcagacccaagggagcaggcagcacaactgtcaagatcgtcctgaaggagaaacatangaaagcctgtgtgcatggcgggaagacgtactcccacggggaggtgtggcacccggccttccgtgccttcggcccttgcccatgcatcctatgcacctgtgaggatggccgccaggactgccagcgtgtgacctgtcccacgaagtacccctgccgtcaccccgagaaagtggctgggaagtgctgcaagatttgcccagaggacaaagcagaccctggccacagtgagatcagttctaccaggtgtcccaaggcaccgggccgggtcctcgtccacacatcggtatccccaagcccagacaacctgcgtcgctttgccctggaacacgaggcctcggacttggtggagatctacctctggaagctggtaaaagatgaggaaactgaggctcagagaggtgaagtacctggcccaaggccacacagccagaatttccacttgactcagatcaagaaagtcaggaagcaagacttccagaaagaggcacagcacttccgactgctcgctggcccccacgaaggtcactggaacgtcttcctagcccagaccctggagctgaaggtcacggccagtccagacaaagtgaccaagacataacaaagacctaacagttgcagatatgagctgtataattgttgttattatatattaataaataagaagttgcataaccatcaaaa

SEQ ID NO: 454 - DNA, 1515 bp, Homo sapiens
  misc_feature (1)..(1515): n is any nucleic acid
agaacagtgcctggnactgagaagtgctncatgaaccctcattaaaatgctggatgaactaactcgggccccactgagcggaagctgaggctgccggctttaccttcttgctctggttggggctggcccagacactgagggggctggagggctgtggtagaggtcatgggagggagggactcagtcagatgtaggtatcagagggacctcttagttagctgataaggggaatggctggcaaggcccaggccagagcttggtttaaatatcaagctggggtcaaatgcaaaatcatcagaaaagtggccttgttaatttcagcaaagattcacatgaaacctcattttcttcttcctcctgcccctcccccactgtggaacctcacactccctctggactccgggccccaccaaagtcctgccagcacaacgggaccatgtaccaacacggagagatcttcagtgcccatgagctgttcccctcccgcctgcccaaccagtgtgtcctctgcagctgcacagagggccagatctactgcggcctcacaacctgccccgaaccaggctgcccagcacccctcccgctgccagactcctgctgccaagcctgcaaagatgaggcaagtgagcaatcggatgaagaggacagtgtgcagtcgctccatggggtgagacatcctcaggatccatgttccagtgatgctgggagaaagagaggcccgggcaccccagcccccactggcctcagcgcccctctgagcttcatccctcgccacttcagacccaagggagcaggcagcacaactgtcaagatcgtcctgaaggagaaacatangaaagcctgtgtgcatggcgggaagacgtactcccacggggaggtgtggcacccggccttccgtgccttcggcccttgcccatgcatcctatgcacctgtgaggatggccgccaggactgccagcgtgtgacctgtcccacgaagtacccctgccgtcaccccgagaaagtggctgggaagtgctgcaagatttgcccagaggacaaagcagaccctggccacagtgagatcagttctaccaggtgtcccaaggcaccgggccgggtcctcgtccacacatcggtatccccaagcccagacaacctgcgtcgctttgccctggaacacgaggcctcggacttggtggagatctacctctggaagctggtaaaagatgaggaaactgaggctcagagaggtgaagtacctggcccaaggccacacagccagaatttccacttgactcagatcaagaaagtcaggaagcaagacttccagaaagaggcacagcacttccgactgctcgctggcccccacgaaggtcactggaacgtcttcctagcccagaccctggagctgaaggtcacggccagtccagacaaagtgaccaagacataacaaagacctaacagttgcagatatgagctgtataattgttgttattatatattaataaataagaagttgcataaccatcaaaa

SEQ ID NO: 455 - DNA, 1890 bp, Homo sapiens
  misc_feature (1)..(1210): n is any nucleic acid
tagnancgnccgccaggggntgnattcgcccttactcannatagggntnaacggccgcccggncaggtgccaaatggacaaataaaaggaaacaagcatgattgtnaggncagaggagggtggnattnagtcagaagactggtgctgtcatcgctgcntggtgactgacttgctgtgtggccntcaggtgtaacttaccctctctgggcctcatttgtctaatcataataattaacgttgataccatgatataaatctgtacagcatttcactgcttgattccctaactgccctgtgagataagcgttaaggctcagagacagtggcatgcccagtgttgcacagtaagtgtgtggtaaagccgagattcaaactcagaccttctggccccttgcctaggagagcatgcccagttgtctagcagattctcttttgtctgagtggcccagatgacatctcttttagagctagaaagaaggagaaatgagacagggtctttgggctggagcctcctgggactaacatggcactggtcggtttgccaggcccagacatgttctgccttttccatgggaagagatactcccccggcgagagctggcacccctacttggagccacaaggcctgatgtactgcctgcgctgtacctgctcagagggcgcccatgtgagttgttaccgcctccactgtccgcctgtccactgcccccagcctgtgacggagccacagcaatgctgtcccaagtgtgtggaacctcacactccctctggactccgggccccaccaaagtcctgccagcacaacgggaccatgtaccaacacggagagatcttcagtgcccatgagctgttcccctcccgcctgcccaaccagtgtgtcctctgcagctgcacagagggccagatctactgcggcctcacaacctgccccgaaccaggctgcccagcacccctcccgctgccagactcctgctgccaagcctgcaaagatgaggcaagtgagcaatcggatgaagaggacagtgtgcagtcgctccatggggtgagacatcctcaggatccatgttccagtgatgctgggagaaagagaggcccgggcaccccagcccccactggcctcagcgcccctctgagcttcatccctcgccacttcagacccaagggagcaggcagcacaactgtcaagatcgtcctgaaggagaaacatangaaagcctgtgtgcatggcgggaagacgtactcccacggggaggtgtggcacccggccttccgtgccttcggcccttgcccatgcatcctatgcacctgtgaggatggccgccaggactgccagcgtgtgacctgtcccacgaagtacccctgccgtcaccccgagaaagtggctgggaagtgctgcaagatttgcccagaggacaaagcagaccctggccacagtgagatcagttctaccaggtgtcccaaggcaccgggccgggtcctcgtccacacatcggtatccccaagcccagacaacctgcgtcgctttgccctggaacacgaggcctcggacttggtggagatctacctctggaagctggtaaaagatgaggaaactgaggctcagagaggtgaagtacctggcccaaggccacacagccagaatttccacttgactcagatcaagaaagtcaggaagcaagacttccagaaagaggcacagcacttccgactgctcgctggcccccacgaaggtcactggaacgtcttcctagcccagaccctggagctgaaggtcacggccagtccagacaaagtgaccaagacataacaaagacctaacagttgcagatatgagctgtataattgttgttattatatattaataaataagaagttgcataaccatcaaaa

SEQ ID NO: 456 - DNA, 1722 bp, Homo sapiens
  misc_feature (1)..(1700): n is any nucleic acid
accttccccctttctttgatcgcctctcccttctgctggaccttccttcgtctctccatctctccctcctttccccgcgttctctttccacctttctcttcttcccaccttagacctcccttcctgccctcctttcctgcccaccgctgcttcctggcccttctccgaccccgctctagcagcagacctcctggggtctgtgggttgatctgtggcccctgtgcctccgtgtccttttcgtctcccttcctcccgactccgctcccggaccagcggcctgaccctggggaaaggatggttcccgaggtgagggtcctctcctccttgctgggactcgcgctgctctggttccccctggactcccacgctcgagcccgcccagacatgttctgccttttccatgggaagagatactcccccggcgagagctggcacccctacttggagccacaaggcctgatgtactgcctgcgctgtacctgctcagagggcgcccatgtgagttgttaccgcctccactgtccgcctgtccactgcccccagcctgtgacggagccacagcaatgctgtcccaagtgtgtggaacctcacactccctctggactccgggccccaccaaagtcctgccagcacaacgggaccatgtaccaacacggagagatcttcagtgcccatgagctgttcccctcccgcctgcccaaccagtgtgtcctctgcagctgcacagagggccagatctactgcgggctcacaacctgccccgaaccaggctgcccagcacccctcccgctgccagactcctgctgccaggcctgcaaagatgaggcaagtgagcaatcggatgaagaggaccgtgtgcagtcgctccatggggtgagacatcctcaggatccatgttccagtgatgctgggagaaagagaggcccgggcaccccagcccccactggcctcagcgcccctctgagcttcatccctcgccacttcatacccaagggagcaggcagcacaactgtcaagatcgtcctgaaggagaaacataagaaagcctgtgtgcatggcgggaagacgtactcccacggggaggtgtggcacccggccttccgtgccttcggccccttgccctgcatcctatgcacctgtgaggatggccgccaggactgccagcgtgtgacctgtcccaccgagtacccctgccgtcaccccgagaaagtggctgggaagtgctgcaagatttgcccagaggacaaagcagaccctggccacagtgagatcagttctaccaggtgtcccaaggcaccgggccgggtcctcgtccacacatcggtatccccaagcccagacaacctgcgtcgctttgccctggaacacgaggcctcggacctggtggagatctacctctggaagctggtaaaagatgaggaaactgaggctcagagaggtgaagtacctggcccaaggccacacagccagaatcttccacttgactcagatcaagaaagtcaggaagcaagacttccagaaagaggcacagcacttccgactgctcgctggcccccacgaaggtcactggaacgtcttcctagcccagaccctggagctgaaggtcacggccagtccagacaaagtgaccaagacataacaaagacctaacagttgcagatatgagctgtataattgctgttattatatattaataaataagaagttgcataaccatcaaaa

SEQ ID NO: 457 - DNA, 1722 bp, Homo sapiens
accttccccctttctttgatcgcctctcccttctgctggaccttccttcgtctctccatctctccctcctttccccgcgttctctttccacctttctcttcttcccaccttagacctcccttcctgccctcctttcctgcccaccgctgcttcctggcccttctccgaccccgctctagcagcagacctcctggggtctgtgggttgatctgtggcccctgtgcctccgtgtccttttcgtctcccttcctcccgactccgctcccggaccagcggcctgaccctggggaaaggatggttcccgaggtgagggtcctctcctccttgctgggactcgcgctgctctggttccccctggactcccacgctcgagcccgcccagacatgttctgccttttccatgggaagagatactcccccggcgagagctggcacccctacttggagccacaaggcctgatgtactgcctgcgctgtacctgctcagagggcgcccatgtgagttgttaccgcctccactgtccgcctgtccactgcccccagcctgtgacggagccacagcaatgctgtcccaagtgtgtggaacctcacactccctctggactccgggccccaccaaagtcctgccagcacaacgggaccatgtaccaacacggagagatcttcagtgcccatgagctgttcccctcccgcctgcccaaccagtgtgtcctctgcagctgcacagagggccagatctactgcggcctcacaacctgccccgaaccaggctgcccagcacccctcccgctgccagactcctgctgccaggcctgcaaaggtgaggcaagtgagcaatcggatgaagaggacagtgtgcagtcgctccatggggtgagacatcctcaggatccatgttccagtgatgctgggagaaagagaggcccgggcaccccagcccccactggcctcagcgcccctctgagcttcatccctcgccacttcagacccaagggagcaggcagcacaactgtcaagatcgtcctgaaggagaaacataagaaagcctgtgtgcatggcgggaagacgtactcccacggggaggtgtggcacccggccttccgtgccttcggccccttgccctgcatcctatgcacctgtgaggatggccgccaggactgccagcgtgtgacctgtcccaccgagtacccctgccgtcaccccgagaaagtggctgggaagtgctgcaagatttgcccagaggacaaagcagaccctggccacagtgagatcagttctaccaggtgtcccaaggcaccgggccgggtcctcgtccacacatcggtatccccaagcccagacaacctgcgtcgctttgccctggaacacgaggcctcggacttggtggagatctacctctggaagctggtaaaagatgaggaaactgaggctcagagaggtgaagtacctggcccaaggccacacagccagaatcttccacttgactcagatcaagaaagtcaggaagcaagacttccagaaagaggcacagcacttccgactgctcgctggcccccacgaaggtcactggaacgtcttcctagcccagaccctggagctgaaggtcacggccagtccagacaaagtgaccaagacataacaaagacctaacagttgcagatatgagctgtataattgttgttattatatattaataaataagaagttgcataaccatcaaaa

SEQ ID NO: 458 - DNA, 1515 bp, Homo sapiens; identical to SEQ ID NO: 388

SEQ ID NO: 459 - DNA, 1817 bp, Homo sapiens; identical to SEQ ID NO: 385

SEQ ID NO: 460 - DNA, 1622 bp, Homo sapiens; identical to SEQ ID NO: 386

SEQ ID NO: 461 - DNA, 1567 bp, Homo sapiens; identical to SEQ ID NO: 387

SEQ ID NO: 462 - DNA, 1202 bp, Mus musculus
  misc_feature (1)..(1202): n is any nucleic acid
atttctctattcctgatcccacactgctctgcctacccacaccagccccaaggtctnagaaagccctggaggctggcttgccaaatccttgtcagtgtntttattgattagtctgagaatatcttagacctcacccacaaggttctgtgtggagcctgtgctctctgtctgtctgtctgtctgtctgtctgtctgtctgtctgcctgcctctctctgtctgtctccgtctgtctctgtctctctgtctgtctctgtctgtctctttctctctgtctctctctgtgtctctgtctctgtctctgtctctctctctctctcagaagtcctctagccttctctagcaggcgtctcatgcagcctggttggtgttcccagctgtggcctatcccacagacagctccacatcctgcttgctgttcgcagagacattcccaggatccatgctcggagaggagaggccccagcacgccagcccccaccagcctcagctcccctctgggcttcatccntcgccacttccagtcagtaggaatgggcagcacaaccatcaagattatcttgaaggagaaacataaaaaagcttgcacacacaatgggaagacatactcccatggggaggtgtggcaccccactgtgctctcctttggccccatgccctgcatcctgtgcacatgtattgatggctaccaggactgccaccgtgtgacctgccccacccaatatccctgcagtcaacccaagaaagtggctgggaagtgctgcaagatctgcccagaggacgaggcggaagatgaccacagtgaggtcatttccacccggtgtcccaaggtaccaggccagttccaggtgtacacgttggcatctccaagcccagacagcctacaccgctttgtcctggagcatgaagcctctgaccaggtagagatgtacatttggaagctggtgaaaggaatttaccacttggttcagatcaagagagtcaggaagcaagatttccagaaagaggttcagaacttccggctgctcaccggcacccatgaaggttactggaccgttttcctagcccagattccagagctgaaagttacagccagcccagacaaagtgaccaagacattatagcaaggacctaaagagttgcagatacgagttttattggttttgttattatatattaataaagaagtcgcattaccctttc

SEQ ID NO: 463 - protein, 398 aa, Homo sapiens
  misc_feature (200)..(200): Xaa is any amino acid
REPQGLMYCLRCTCSEGAHVSCYRLHCPPVHCPQPVTEPQQCCPKCVEPHTPSGLRAPPKSCQHNGTMYQHGEIFSAHELFPSRLPNQCVLCSCTEGQIYCGLTTCPEPGCPAPLPLPDSCCQACKDEASEQSDEEDSVQSLHGVRHPQDPCSSDAGRKRGPGTPAPTGLSAPLSFIPRHFRPKGAGSTTVKIVLKEKHXKACVHGGKTYSHGEVWHPAFRAFGPCPCILCTCEDGRQDCQRVTCPTKYPCRHPEKVAGKCCKICPEDKADPGHSEISSTRCPKAPGRVLVHTSVSPSPDNLRRFALEHEASDLVEIYLWKLVKDEETEAQRGEVPGPRPHSQNFHLTQIKKVRKQDFQKEAQHFRLLAGPHEGHWNVFLAQTLELKVTASPDKVTKT

SEQ ID NO: 464 - protein, 539 aa, Homo sapiens
  misc_feature (1)..(539): Xaa is any amino acid
SPLPSAGPSFVSPSLPPFPAFSFHLSLLPTLDLPSCPPFLPTAASWPFSDPALAADLLGSCGLICGPCXSVSFSSPVLPTPLPDQRPDPGERMVPEVRVLSSLLGLALLWFPLDSHARARPDMFCLFHGKRYSPGESWHPYLEPQGLMYCLRCTCSEGAHVSCYRLHCPPVHCPQPVTEPQQCCPKCVEPHTPSGLRAPPKSCQHNGTMYQHGEIFSAHELFPSRLPNQCVLCSCTEGQIYCGLTTCPEPGCPAPLPLPDSCCQACKDEASEQSDEEDSVQSLHGVRHPQDPCSSDAGRKRGPGTPAPTGLSAPLSFIPRHFRPKGAGSTTVKIVLKEKHXKACVHGGKTYSHGEVWHPAFRAFGPCPCILCTCEDGRQDCQRVTCPTKYPCRHPEKVAGKCCKICPEDKADPGHSEISSTRCPKAPGRVLVHTSVSPSPDNLRRFALEHEASDLVEIYLWKLVKDEETEAQRGEVPGPRPHSQNFHLTQIKKVRKQDFQKEAQHFRLLAGPHEGHWNVFLAQTLELKVTASPDKVTKT

SEQ ID NO: 465 - protein, 388 aa, Homo sapiens
  misc_feature (1)..(388): Xaa is any amino acid
ISSWGQMQNHQKSGLVNFSKDSHETSFSSSSCPSPTVEPHTPSGLRAPPKSCQHNGTMYQHGEIFSAHELFPSRLPNQCVLCSCTEGQIYCGLTTCPEPGCPAPLPLPDSCCQACKDEASEQSDEEDSVQSLHGVRHPQDPCSSDAGRKRGPGTPAPTGLSAPLSFIPRHFRPKGAGSTTVKIVLKEKHXKACVHGGKTYSHGEVWHPAFRAFGPCPCILCTCEDGRQDCQRVTCPTKYPCRHPEKVAGKCCKICPEDKADPGHSEISSTRCPKAPGRVLVHTSVSPSPDNLRRFALEHEASDLVEIYLWKLVKDEETEAQRGEVPGPRPHSQNFHLTQIKKVRKQDFQKEAQHFRLLAGPHEGHWNVFLAQTLELKVTASPDKVTKT

SEQ ID NO: 466 - protein, 439 aa, Homo sapiens
  misc_feature (241)..(241): Xaa is any amino acid
DRVFGLEPPGTNMALVGLPGPDMFCLFHGKRYSPGESWHPYLEPQGLMYCLRCTCSEGAHVSCYRLHCPPVHCPQPVTEPQQCCPKCVEPHTPSGLRAPPKSCQHNGTMYQHGEIFSAHELFPSRLPNQCVLCSCTEGQIYCGLTTCPEPGCPAPLPLPDSCCQACKDEASEQSDEEDSVQSLHGVRHPQDPCSSDAGRKRGPGTPAPTGLSAPLSFIPRHFRPKGAGSTTVKIVLKEKHXKACVHGGKTYSHGEVWHPAFRAFGPCPCILCTCEDGRQDCQRVTCPTKYPCRHPEKVAGKCCKICPEDKADPGHSEISSTRCPKAPGRVLVHTSVSPSPDNLRRFALEHEASDLVEIYLWKLVKDEETEAQRGEVPGPRPHSQNFHLTQIKKVRKQDFQKEAQHFRLLAGPHEGHWNVFLAQTLELKVTASPDKVTKT

SEQ ID NO: 467 - protein, 549 aa, Homo sapiens [sequence omitted]

SEQ ID NO: 468 - protein, 549 aa, Homo sapiens
TFPLSLIASPFCWTFLRLSISPSFPRVLFPPFSSSHLRPPFLPSFPAHRCFLALLRPRSSSRPPGVCGLICGPCASVSFSSPFLPTPLPDQRPDPGERMVPEVRVLSSLLGLALLWFPLDSHARARPDMFCLFHGKRYSPGESWHPYLEPQGLMYCLRCTCSEGAHVSCYRLHCPPVHCPQPVTEPQQCCPKCVEPHTPSGLRAPPKSCQHNGTMYQHGEIFSAHELFPSRLPNQCVLCSCTEGQIYCGLTTCPEPGCPAPLPLPDSCCQACKGEASEQSDEEDSVQSLHGVRHPQDPCSSDAGRKRGPGTPAPTGLSAPLSFIPRHFRPKGAGSTTVKIVLKEKHKKACVHGGKTYSHGEVWHPAFRAFGPLPCILCTCEDGRQDCQRVTCPTEYPCRHPEKVAGKCCKICPEDKADPGHSEISSTRCPKAPGRVLVHTSVSPSPDNLRRFALEHEASDLVEIYLWKLVKDEETEAQRGEVPGPRPHSQNLPLDSDQESQEARLPERGTALPTARWPPRRSLERLPSPDPGAEGHGQSRQSDQDITKT

SEQ ID NO: 469 - protein, 392 aa, Homo sapiens
ISSWGQMQNHQKSGLVNFSKDSHETSFSSSSCPSPTAEPHTPSGLRAPPKSCQHNGTMYQHGEIFSAHELFPSRLPNQCVLCSCTEGQIYCGLTTCPEPGCPAPLPLPDSCCQACKDEASEQSDEEDSVQSLHGVRHPQDPCSSDAGRKRGPGTPAPTGLSAPLSFIPRHFRPKGAGSTTVKIVLKEKHKKACVHGGKTYSHGEVWHPAFRAFGPLPCILCTCEDGRQDCQRVTCPTEYPCRHPEKVAGKCCKICPEDKADPGHSEISSTRCPKAPGRVLVHTSVSPSPDNLRRFALEHEASDLVEIYLWKLVKDEETEAQRGEVPGPRPHSQNLPLDSDQESQEARLPERGTALPTARWPPRRSLERLPSPDPGAEGHGQSRQSDQDITKT

SEQ ID NO: 470 - protein, 443 aa, Homo sapiens
DRVFGLEPPGTNMALVGLPGPDMFCLFHGKRYSPGESWHPYLEPQGLMYCLRCTCSEGAHVSCYRLHCPPVHCPQPVTEPQQCCPKCVEPHTPSGLRAPPKSCQHNGTMYQHGEIFSAHELFPSRLPNQCVLCSCTEGQIYCGLTTCPEPGCPAPLPLPDSCCQACKDEASEQSDEEDSVQSLHGVRHPQDPCSSDAGRKRGPGTPAPTGLSAPLSFIPRHFRPKGAGSTTVKIVLKEKHKKACVHGGKTYSHGEVWHPAFRAFGPLPCILCTCEDGRQDCQRVTCPTEYPCRHPEKVAGKCCKICPEDKADPGHSEISSTRCPKAPGRVLVHTSVSPSPDNLRRFALEHEASDLVEIYLWKLVKDEETEAQRGEVPGPRPHSQNLPLDSDQESQEARLPERGTALPTARWPPRRSLERLPSPDPGAEGHGQSRQSDQDITKT

SEQ ID NO: 471 - protein, 378 aa, Homo sapiens
DRVFGLEPPGTNMALVGLPGPDMFCLFHGKRYSPGESWHPYLEPQGLMYCLRCTCSEGAHVSCYRLHCPPVHCPQPVTEPQQCCPKCVEPHTPSGLRAPPKSCQHNGTMYQHGEIFSAHELFPSRLPNQCVLCSCTEGQIYCGLTTCPEPGCPAPLPLPDSCCQACKDEASEQSDEEDSVQSLHGVRHPQDPCSSDAGRKRGPGTPAPTGLSAPLSFIPRHFRPKGAGSTTVKIVLKEKHKKEDKADPGHSEISSTRCPKAPGRVLVHTSVSPSPDNLRRFALEHEASDLVEIYLWKLVKDEETEAQRGEVPGPRPHSQNLPLDSDQESQEARLPERGTALPTARWPPRRSLERLPSPDPGAEGHGQSRQSDQDITKT

SEQ ID NO: 472 - protein, 356 aa, Homo sapiens
DRVFGLEPPGTNMALVGLPGPDMFCLFHGKRYSPGESWHPYLEPQGLMYCLRCTCSEGAHVSCYRLHCPPVHCPQPVTEPQQCCPKCVEPHTPSGLRAPPKSCQHNGTMYQHGEIFSAHELFPSRLPNQCVLCSCTEGQIYCGLTTCPEPGCPAPLPLPDSCCQACKDEASEQSDEEDSVQSLHGVRHPQDPCSSDAGRKRGPGTPAPTGLSAPLSFIPRHFRPKGAGSTTVKIVLKEKHKKEDKADPGHSEISSTRCPKAPGRVLVHTSVSPSPDNLRRFALEHEASDLVEIYLWKLVKGIFHLTQIKKVRKQDFQKEAQHFRLLAGPHEGHWNVFLAQTLELKVTASPDKVTKT

SEQ ID NO: 473 - protein, 397 aa, Mus musculus
  misc_feature (1)..(397): Xaa is any amino acid
FLYSSHTALPTHTSPKVXESPGGWLAKSLSVXLLISLRISTSPTRFCVEPVLSVCLSVCLSVCLSACLSLSVSVCLCLSVCLCLSLSLCLSLCLCLCLCLSLSLRSPLAFSSRRLMQPGWCSQLWPIPQTAPHPACCSQRHSQDPCSERRGPSTPAPTSLSSPLGFIXRHFQSVGMGSTTIKIILKEKHKKACTHNGKTYSHGEVWHPTVLSFGPMPCILCTCIDGYQDCHRVTCPTQYPCSQPKKVAGKCCKICPEDEAEDDHSEVISTRCPKVPGQFQVYTLASPSPDSLHRFVLEHEASDQVEMYIWKLVKGIYHLVQIKRVRKQDFQKEVQNFRLLTGTHEGYWTVFLAQIPELKVTASPDKVTKTLQGPKELQIRVLLVLLLYINKEVALPF

SEQ ID NO: 474 - protein, 23 aa, Artificial
  Synthetic peptide
VSQERAAQDALWMGQAGRMCSCS

SEQ ID NO: 475 - protein, 18 aa, Artificial
  Synthetic peptide
GCPESGTSASMAGHESKP

SEQ ID NO: 476 - protein, 43 aa, Artificial
  Synthetic peptide
TATPENLLGDRRGICAQLDLLLACGEGSDRSTHHTGSPCPGCL

SEQ ID NO: 477 - protein, 36 aa, Artificial
  Synthetic peptide
VRAMDTLLDQPCLLQGAGHRRETACPGEWGTAGWEL

SEQ ID NO: 478 - protein, 6 aa, Artificial
  Synthetic peptide
VSRLHS

SEQ ID NO: 479 - protein, 50 aa, Artificial
  Synthetic peptide
KKGQGRSGASWGCDLNPGRGSLCAYSRLSGAQRDSDEARGLRRDRGDSEV

SEQ ID NO: 480 - protein, 21 aa, Artificial
  Synthetic peptide
CEWGCWSMAPIPQGPISLKVP

SEQ ID NO: 481 - protein, 3 aa, Artificial
  Synthetic peptide
SSP

SEQ ID NO: 482 - protein, 9 aa, Artificial
  Synthetic peptide
GEILSPPGP

SEQ ID NO: 483 - protein, 7 aa, Artificial
  Synthetic peptide
MITPTVK

SEQ ID NO: 484 - protein, 24 aa, Artificial
  Synthetic peptide
YQPPSTNKNTKSQRRKGSTFEERK

SEQ ID NO: 485 - protein, 5 aa, Artificial
  Synthetic peptide
MITPT

SEQ ID NO: 486 - protein, 61 aa, Artificial
  Synthetic peptide
YQPPSTNKNTKSQRRKGWPKTHPGGEQKEGTEASLQIRGKKKEQRREIGSRNAECRGKKGK

SEQ ID NO: 487 - protein, 19 aa, Artificial
  Synthetic peptide
EVHLKNASRGSAGNKNYRM

SEQ ID NO: 488 - protein, 35 aa, Artificial
  Synthetic peptide
SRKILLKLRSSVARCSGSLLKFQQFERPRQENCLS

SEQ ID NO: 489 - protein, 7 aa, Artificial
  Synthetic peptide
MITPTVK

SEQ ID NO: 490 - protein, 35 aa, Artificial; identical to SEQ ID NO: 488
  Synthetic peptide

SEQ ID NO: 491 - protein, 61 aa, Artificial
  Synthetic peptide
MNSFSTSKCRKSLALELPAAVEPCVREGCVAQGGLAGGQQQRQAPSCAVSSPLRSLPSGTG

SEQ ID NO: 492 - protein, 41 aa, Artificial
  Synthetic peptide
VGVSSFPQLGVGEDRLKDSVLDNSGMQCHFQKRRLHVNKRV

SEQ ID NO: 493 - protein, 19 aa, Artificial
  Synthetic peptide
IWLKKMDASNLDSMRRLAW

SEQ ID NO: 494 - protein, 10 aa, Artificial
  Synthetic peptide
NMRDITWALN

SEQ ID NO: 495 - protein, 19 aa, Artificial
  Synthetic peptide
KMWTTVSMPYIQPPSLTFP

SEQ ID NO: 496 - protein, 19 aa, Artificial
  Synthetic peptide
KMWTTVSMPYIQPPSLTFP

SEQ ID NO: 497 - protein, 24 aa, Artificial
  Synthetic peptide
ESGKPSAADPGWTPGCQRQLSLAG

SEQ ID NO: 498 - protein, 4 aa, Artificial
  Synthetic peptide
GFPP

SEQ ID NO: 499 - protein, 4 aa, Artificial
  Synthetic peptide
AHTE

SEQ ID NO: 500 - protein, 18 aa, Artificial
  Synthetic peptide
VPLPFTTWRRTPGMRLGS

SEQ ID NO: 501 - protein, 9 aa, Artificial
  Synthetic peptide
GTVFVFILF

SEQ ID NO: 502 - protein, 4 aa, Artificial
  Synthetic peptide
GKSL

SEQ ID NO: 503 - protein, 13 aa, Artificial
  Synthetic peptide
SKSGSCLFLHLRW

SEQ ID NO: 504 - protein, 47 aa, Artificial
  Synthetic peptide
APCCQEGLRAGGSGSLHLGRDFTVLAGARGSPSPSVSSIPRFWIPGS

SEQ ID NO: 505 - protein, 9 aa, Artificial
  Synthetic peptide
QPVLRGVSL

SEQ ID NO: 506 - protein, 33 aa, Artificial
  Synthetic peptide
VSPWGQGHLPGACYELTASVLTSELSVMPSFPA

What is claimed is:

1. An isolated polynucleotide comprising a nucleic acid sequence according to SEQ ID NO:1.

2. The isolated polynucleotide of claim 1, comprising a polynucleotide having a nucleic acid sequence according to any one of SEQ ID NOs:2-7.

3. An isolated polypeptide comprising an amino acid sequence according to SEQ ID NO:9.

4. An isolated chimeric polypeptide encoding for S71513_P2 (SEQ ID NO:9), comprising a first amino acid sequence being at least 90% homologous to MKVSAALLCLLLIAATFIPQGLAQPDAINAPVTCCYNFTNRKISVQRLASYRRITSSKCP KEAV corresponding to amino acids 1-64 of SY02_HUMAN, which also corresponds to amino acids 1-64 of S71513_P2 (SEQ ID NO:9), and a second amino acid sequence comprising a polypeptide having the sequence M corresponding to amino acid 65 of S71513_P2 (SEQ ID NO:9), wherein said first amino acid sequence and second amino acid sequence are contiguous and in a sequential order.

5. An antibody capable of specifically binding to an epitope of an amino acid sequence of claim 3.

6. The antibody of claim 5, wherein said amino acid sequence corresponds to a bridge including amino acids 64 and 65 of SEQ ID NO: 9, of at least about 10 amino acids (amino acids 55-65 of SEQ ID NO:9), at least about 20 amino acids (amino acids 45-65 of SEQ ID NO:9), at least about 30 amino acids (amino acids 35-65 of SEQ ID NO:9) and at least about 40 amino acids (amino acids 25-65 of SEQ ID NO:9) in length.

7. The antibody of claim 5, wherein said antibody is capable of differentiating between a splice variant having said epitope and a corresponding known protein, SY02_HUMAN.

8. A kit for detecting endometriosis, comprising a kit detecting overexpression of a splice variant of claim 1.

9. The kit of claim 8, wherein said kit comprises a NAT-based technology.

10. The kit of claim 9, wherein, where a nucleic acid sequence is utilized, said kit further comprises at least one primer pair capable of selectively hybridizing to the nucleic acid sequence.

11. The kit of claim 10, wherein, where a nucleic acid sequence is utilized, said kit further comprises at least one oligonucleotide capable of selectively hybridizing to the nucleic acid sequence.

12. A kit for detecting endometriosis, comprising a kit comprising an antibody according to claim 5.

13. The kit of claim 12, wherein said kit further comprises at least one reagent for performing an ELISA or a Western blot.

14. A method for detecting endometriosis, comprising detecting overexpression and/or underexpression of a splice variant according to claim 1.

15. The method of claim 14, wherein said detecting overexpression is performed with a NAT-based technology.

16. A method for detecting endometriosis, comprising detecting overexpression and/or underexpression of a splice variant according to claim 3, wherein said detecting overexpression is performed with an immunoassay.

17. A method for detecting endometriosis, comprising detecting overexpression and/or underexpression of a splice variant performed with an immunoassay, according to claim 5.

18. A biomarker capable of detecting endometriosis, comprising a nucleic acid sequence or a fragment thereof according to claim 1, or an amino acid sequence or a fragment thereof according to claim 3.

19. A method for screening for endometriosis, comprising detecting endometriosis cells with a biomarker according to claim 18.

20. A method for diagnosing endometriosis, comprising detecting endometriosis cells with a biomarker according to claim 18.

21. A method for monitoring disease progression and/or treatment efficacy and/or relapse of endometriosis, comprising detecting endometriosis cells with a biomarker according to claim 18.

22. A method of selecting a therapy for endometriosis, comprising detecting endometriosis cells with a biomarker according to claim 18 and selecting a therapy according to said detection.
